United States Patent Application Publication US 2026/0058010 A1 - sequence listing, part 25

SEQ ID NO: 298 - DNA, 771218 bp, Homo sapiens
  source 1..771218: mol_type = genomic DNA
ggagattttagtacaaattcacatatattgttttctcaacaaatggaaaattatgttccacattcattgtgctgggtttgccgagcctgctcttttgaaactcactgtctcatctcttatatttgccttctctgtcactgtcgatgttttcctaatacttcatcctttacgcagactccttccttggagctgaatttggcagtggagtttgcctaactaatggggaccatatgctctgcaattacattccccaacaacattcagatttgttagcaaatattggagaaggcaagttgagaaactggagtgcaaaggacagtcaggaactggcacattctgacaggtaaacctgcatttgctgaccactggaaataagttccagttagggcttatactgacttaggtagaagggggatttgtttttttaaaatatctatcagttggtatacttctcttcaaatagctaagtgcgcctctgatgtgttcccaatggcaaactgtgctttcccctgcagatcaatttttaatacatgactatcacctgtttatttgttgatcccaaccctcccccagactggagaactggaatcatagaattcctcactgttgttttcccagctcccagcagaggactgttaacataatagctattcagtaaatatttggctaatgagcaaatgagacaatctctagaatacattaaatctcaatacattctgcacattacatctgtatgccttggatggctttttcccattctccagatccttccctttctctaggctggaccagctttactcttgggagtccaggcccctgaaaagagtgcaaactctgaaggttctgaagaaggtttagagcatggcccaacatggcaacattcatttttaagggcttttttttttttttttttggcttttaaaagttccatctgttgccctgttggggatgagcgtggagcaggatgagttaaacctttaacacattgtcctgggttttgataagctaaatgcaggggaaagaacaccatttgtctgtgcaaatggcaggaaatggtaactagcttgagagtgggtggctgaggggagaaatgctttagcttttcaaggacctactgaatgctgtgcatttctttagtggccggcttgctggagccttctgcaggagcacctgtcccattggccccagtgtggctgcgtagggctctcaggcaccacgttgaatgacagcagctcttcctctctgccgtgcctattgcagtcttgggcagcacccactgactggctccttgaagaccatggaggtggggaggtctatttgcactcgaagctgcaaagggaagctcatggtttcaatcaatccacaactttgccttcatggaggagcatgaagggaggagacaaaagctgcctgattagaactcagggacctcaccatccccagctcacctctcacccccatggcatgtaactgctacaaagacacaagaaacactccttgttttagaacacaaatacataaatttttaatctgcgaaaaatacaaaatgaaaccatgtacaagttatgtacaaaccctttttacaagacaagagagttatcactggttgttacagatgacagagttgggtagatcatttcagagcaccagcatatagtctcttcttcaattcctgtcaggtcagagtaattaatcataatcataatcataatgccaacaatcaaaagattgaaagatgaataagccacgctctttttcctcaatgaacatgtaggctgaactctgcatgtgtgtactttttttttctttgtcccctaaagaaaccttgaagtgcaggttttggtgttaagcagagaaaggtttcttttcaacatctgggtggtgggatgtgggccagaagttttaggcaggatgtgattgtgccacctgggaatgcaacgtttttaattaggatttcccaacagatctgggtttgtgtttgaaatgttgcagttctggtcaaaggcgtgtcaggctgcattgagcggaaggaaggggaggagagcgagcgctctggggcagatgggactctggttttgtgtggaagtgaggctcagtccaccttgcgggcggggctcctgtccctgccagctgccttcccacgctgaccctgagtcccatgggagggaagcactgggtcactcccgcaggcgtgtgtcaatgccttgtgtacatttccatctaagattctaaacagtggggcccggtagtgcttcccaaggcaggcatggccgagagcattggtgtcacttctgcccctgttctgttaactagcaagatggaggagaagcagcagcacagaagtcctcaagggataagcaaaggaaacctttctaaactgaaaaacctacctaaaaataaagtccactttcacctggccagaacatctcttctcacaatgcctgttcagaaaagccaccaaagcaaggtggtcgtagcatttgttttcagacccctgaaactaaggatgcagtgtgtgtgctgttcagggagggaagaagaacagtgcagtgacatgcacaggaaggtgaaaggagatgcccaccctgagacccctccctggtgagtcctccagaaagactgccgatcaccacaggttctgtccagcctccatccaccatggcagccacagtgatacatagtggccgagtgactgcccacgtgggccagacctcatgacaaactctgggaatatggacaaataagcagagttcctgcccttcgagtgagtcttttgacttgtgcctcaccatctccaacacctttcatctccaacctcatagatgatcttccctctctttcttaaaattcccctcttgtttctcatttccctggttctggagtaccctagatctcctgtcccaagaagttctacttattttgctccttcttagtcctgaaaaacttggctgtagcccacaaacacatctgccagctgatctaaacctacactttctccctaaaataattcatccaggatcctcactttctaagtgcctctgtgggtctggcttccacatctgcagggcctgttgtagcccactcctttactcccctgtcccactcctcttgcctgtgtggccttccctcacggacagctctcagcttttcttgctctggatgaacccaatgtaacatttcttagctgctgtactcactgcctccgcttcttgcctgcttctcttgttttcctattcctccacatggttctgtccttgaggacagattaggtgtgtgtccactgcacaatgaatatactctagacccacagccattgccccacatccagtccctacaatcccaaccaatcttctacaactattacgatctataacatttatttgctattcagtgttcacatttattcaaaaattatttattgaacacctgttttgtgcaacatgatctttccaatatatgtgtgccttgtgttcccagttaggcaggtgggctgtcttcctctaatagtcttaccatcgtgaggacacagcagctgctcagtaaatatcaattagcagttactgattaacatcattcaccctgccacatgccagataatcctgccttcatacctagaatgctgatcctctacttatctaactcctaaacccccctttctctagaaatcctaccttgttgaaccacttcaaaccacagcatttctcccttgtttcaactcctaccatattgaatgtgaaactatgtcattagggctcaccctttctctaatggtgctttgagcatgttttctttctttagttgtattataagctgattgatggcagaacccatattgtgctcatttctcccccactcactccttgtacaaatattttatgagtgctaattggtttctaaacaagggctacctgattagctgcaagggtgttttcataaggggaattcctatttggcagttctggactattaattattctctactatttgtggatgtcctgcctcatgttcttattatattactgtctagaaaacagtatgattggcaggtttttaaaaatttatgtatctattcctaccctctaatctactttgtgagtttgttgctgacattctagtaattcaggagagtcaggacgttctacgtctgatggtcctgtgacagaaagcaaagcaaaatgtgtgaggaaggtgctgcacacggtgagttgttgacttggagtgtgcaccctttagcactccttgctgctgagaaaatgttcagttttgtgtgcattctcatgatatcttccaggaagaactgacatctcactactttcaacctgaaaaatgcacagccattgctgccccatcactctttgcttaaaactctgagtggcttttcatgactttctaaatcaagtttcaaactttatctaggcctttagactgtactttgtagccccttccatgaagtctcatctcagttttcctcagttcccctacacaaacttatcacagtagacaaaatagtcaatctattgaaatcacattcctacaaatacatcatggcccattaagtcccatctccctggaaaaccctcatattccacatctttccagtcctgtcacccatttactattgaaatgcctccaaagcccatcaaacattgtatacctctgcattcttgccagcctacgcagttcaatgcaaactcttctttctttcaacccaaagaactactctttgtaccatatgcatgcccataactcatggtattttaaaatactgcttattatatctttttcttttttttctttcttcccagattcttaatgtataccccaagtttggcttatctttagatagggagtctcaggtcctttttgtgattaaaaaaatatgccaaaagaggaaggtctgctacaggtggtctaagtcagaattctttctccaatctatccatgtggggctgtgatatcatggagcttccaactgttgtagggctaaaggtgcctctgcctttgagcatgtaggcttctttttatacatgttttaagcaagcttaccataaaaattgaaaattaggctctgtggtctcttaagaaataaaattaaaaatgttttccaagttttcttatttttatggaaatcttgaaattattaacaactgatactttattggaaacaaacaatcagaagagactccacttaaacaaccaatatgaccaaactagtacaaactgcctaggaatcatttataattactactgtctcataaataaatccaaatagcgtcatcacctcctcaaatgacctgggatttatatgctaaatcatctctgctggattaaaaaaattgccttttgggaataaggagaggatcagaaaggtaatttaccagaagattgtaagtaaattctgtttcttttgctttttaaagagggtgagtcaagtcctcattagtgaaggtcctttcaaggctcatggtgactggtggctttaccaccattccaaaagcagcaagtaagaacaaaacagaaaatggacagattctgccctggaactcagtgttcaagctgaatggatctacttagtctcctaggagtcaagccggctcacatctcagtcaattggttggatagtctttgtttctctcccttcctacctttattcctcaatttcttccttccttccttcaatgagattctctttcacaatgaaacacaatagattaaaattacatttgtgaatgtaagtagctaagagatggttagtttattaatgaaagaaaataaccaaataaacagaggacaggaaatgaagtgagaaggaagactggttacttcctgaagattcacatggggaaacataaatggggaaaatggcaggaatttggggtctcttgaacctctagttacatactaggaattggagacatggcatagagatgaagggattaactgaagctgggccttgaaccaaaaaaaaaacaacaaaaaagggaaggcagggatgaaactgagaagaaaaccctagaaacaggcagcaaaatttgaccaacgtgatgcaggtgtgtccaaattgagaaatctgcatcttgaacctaaagagaatctaaagtgaaaagaccaggaatgaacctacctattctatgtccagagcagaaaatgttcaccactcctgagtaaggctgggagtgttgcctgggtgatgcagcaaaaaggacctttattccagtcctggacacaatagtctgcatgggcttagccaaggagaagcagccactcccatgttcccactcctaacttagatcacgtcccctgggacctgaaagagaccttagagtcatctagatgaatcactctcatttacaaatgaagtcactgagactcagagagttttaaaaacatttttaaagatcaagtttgttgtttgtaaatgtggctcttgcaccctcatattaaatggtaactagggaacttgtgctttttctcctttcaacatgaaaaagtcccaaatttcttatgctttttcacttttcctttatctaaccctaacacttctaatttcctgtttatttaaaatcttcaatcaatttttttacaaagtacatcataaggtgccagaacccttgggaggaaagattggaatgttctccaacgtgccttagtcacaatcacttttatttaaggtgttttataatggttcaagatgatattctaaaatataaaattgcttagacaaaaataaaagttttctcaaggagaaaggttatgatggtgatgatattttctgctttgtaaacagcctgttggtgacccacagcacccaagaatcattagtttgggagaatggcttttctggagccctaaactgggataggaaatcagagcctcataatgtggactgtaccaaagaccctccttggtctcaggcggatgtaggcagaaagacagactgttgcagtggagatggatgggactcagggccaaagagctcaacaagtaggaacaagccagggagaagctctggcatttgcttgagccctccagtgatttcacaaatgttatttctgtttccatttcgtttctacttaccaggcaccagcttttgccaaagggcccaacaatcagtcattttcctacccccttaacaaaatgcctcattttgttttctagtccagaacaattcattattacaacggcaacacagtatgaacttattgctctatttaaaagaaaatgaatttttaccaatttggtttttttgggggggaggtgcttatgaatcaaggagccctttgctataggaaactatcctaactattatgattttttttaaaaaaagtttagattaaaatttctagccacaaatgcatcggtggatgtgtggtggggctggagtttgcatttctgcttccagattgccttgttaggggagacacagggaagagagggtcatgggaatggagctttgtgtcctgtgtccctctaatggaagatcctttatgtggccaccacagcctgccagaggagaccaaatcactctaacaaatttggaggtggttattacgagcaggagtgaagagcccactatggttcacgaaggaaagaagagcgtggattgacgtgaatatactaaggtgaccccaatgcaaaatcattatgtaaaaaaggcctagctttcaggaaagttgtcaaaatcctagcaaaacgttctccccacaaacacatttgacttctgttggaaaccaagaaatgtttataagcctgaatatagactgttgacatcattttagtctgctgagtaggctagtgattaattataagtagtttttaaacaatccaattggacatacattgtattcacaatacttttatagaactaattctacaaaatgtgacgacagagtaaccacagtccgacaaatcactgcaggacaatgcctacgaggtggaagcacgactatattggctctgcagggagtggacagaggtggaagctcattttgcctacgctggtaattggagtacttagtggacatatgtcttcatgatgatctcattgctttgctctgatctgatttgcactaccataactaggtaccacaggtcatggcccaaagagttaatggactagatatcatgaaacttcggggagatactttggttagcttggttccattaagtgtccacagtttacattttttaagaaaatagaaatcactattacatccatgcttctccagagaccttgatgatcatatcaaagattgataattttaaagttgaaagacttgctaagttgattggaacaaaacagttgccgggagactgtacaccgagcatgcaagcgatagcagagctctgagacatcgtaattgcatctgatggctagaaaaatcttttgaccgcagtttaaagtggctaatttatttgatttcactgctggtaattttcaaaggccttttctaacagtctatatgaagtgcattcgttgctttccttttgttattattatttttaaattgttgtaacaagttcatgtgtttggccccagcaactaaataaaggagagcatgcaaattaaaatctgtctccatgattgtagaaatttcctggtttttaaacaaaaactcagtgagaagaatgactgccctctcacatcctatggtaaagtaaaactactaatcagttttacaaacttccaggctaaaagctctgagacttggggagtggggagaaagtccaccagaccctcccgaagttgacattactcgctcaggtggtttggaaatataaaatgagaagcataacagcacgtaggagtctccaccactagaacagcaaacagagcaatgccttgtgtgcatctggtcctcagcttccacatcccaggtgtgcccacaaccctcctggtgtccttagttggccagacaaacctgatctgccaattgtagaaaagcagcagaaggtcttccctttaaaaatatgaacaaaggggtgagaactacagaatgaaaactagaactacaaaaatatgactttcaactgtgaaaataaataagtttccatttattaagagctggtgtcaatgcagatcaaaatacacacccatccaggcgaggagcaggtattcacctgtccccttagtcttcttttctggatttactaaaatacatgtatacatcattggccattttaaaattgttttaataattcatttcccttaattacaattaattgtggtggtgaccatcattctcctcaaagaaaaagagagaaagaagagaaaaacacattaaggagtctgaccacttattcatttagattttgcattgtttagatatagggaagatatttgacaatgaaaagaaaaaatatattttctttctaataaataaaaataatttaaaatgctagaggctatacatgactattttagtatgttcatttataaatgaaatcattttcttttccaaaatacatggaagcaatattcaaggcagacaaagagaaagatctgtctactttattttctggcaattcttgcttatcctaacgtttccaccagtgattcagcatgtaagaagaaaagtcacatcaccatttatgaagtttgtcaggctttaaaaaaatagttctggtctcctgggagtcaacattcatcttcaacttctctgattggtggaatcaagctgcttgtggatttatattggttgatctggttagccatgtgggtactcatgggcttgatttgaatgtttctgggataggcattatccggttcatctgtaaaccatttcttttctgctaaagggcaaaatggatagagaacaagaaggagaaatgagaagtttaattagtcctagggtaaagcctttggaaagttcattgaaaaacgcaaaaaggtaatcgatagaagccgacagtgagtaattgctaagagagacagtgcagtgtagggaggaccccagaacctgaaatatacctctgcttcctgtagcaagtgatgaacaaaatgtgccactgggactcataggcaccatgggcggacctcagaggctaaggagggattggagaatggactctggcaatgtcccttggagttaatttcatggccagaaaaggtttggtggggaggggatgttgcatatatcagccattgggtacagacattgtgcctgaggagagatgtgtgcatccattgatttgagtggaacggaagggcaccatcacccttgctgcagagcgagtgatccagaatcttacacagaatcaccacctcccagccttttcttggctttgcttataatacacacacttaaagccatgtctcaactataccactctcctgtttcatttgtagccactttggggggtctaaactaaacccatagattttgctggccaaaaatctatgaaaatcagaatagcgaccaatgttttaaagaggattttgaggtggcttttatttcaagaaagaaaactctgtgttggtataaagttatgaatagagttccaagtggcaatatcttaactgactataataacccaagctgtcgacaagggagctcaatgaagtcttggcatttcatttccaccctaaatacagaaatggctgagagagaatgctgagtcagggcgtttgggggctggggtgagaatgaaaatggtctagcatcctcttagcagtgcaaagctattttacaagactcaaccctcatccccacctctttctaggattgaaattttctgggaaattggccatgtgtatagataggaaaggactgggcaaataggacattctaacttgggaatcatatgcctcactttagtggcttagggaaagaaaagaaaaagaaaaagggtaaaagctatcaagcacgtccactgctatagagacaatggcctctgtagctgctttttctgcttaccagaacaatttgtaactgccttgtcagtggtcctgaatggacacattagtgaaaactgctcacctggtttgatagggggcgttgggggtggggtatgtgcatgtttggctaatgatttataaattatctatgatcagttcatgaccactctgcttgtttctcctcagttcctacttctgctgtttcaagtgccctgagctgtcaatgtcgaggagggctgtcactggagctgggatatgcctgagtcaaagcctcgccccagtttaatgcggcagctcagtttaccccacaggaaacttgctgcctcttgcctcgttctccccaccccctctcctgctctggctcactcacctattataattaagttcactttgatttgaacagattggacgataggaattcataatgctacatcctcacagtgaagctaactgattaagtgctttaaattattccccctgacagaatgataaagttacaatctgttctgagatgatctacagcttgccagactcctacagcttctttctacattcatttatctttttgtcaagcagagttttttttttttccctaagcttcaattccatagatcttttaaagtcatcagcacatctgaattattaatgaggctttagaggcaaggttcctgatgggctggttaaaaaaggttgtatagaaatccgggactgtgtacacatcaaaataatttcagctccatttaaaaaaccatttagttcaagtgtgacatagatgaaccattatgcatttgtggaaaccaattttttgtgatctacgattaaactaacctttcagagaggagtaaagtgtgatggttatcatgttttaaaagctttgccaggccgctgaaacaatttcacactacgactttttccaggggtttatgtgtaaagatgattttcagagaggttgagcctggtgtttgtgctcaggttgcctgagctgccctcggttttggccatgctgttatgcagactgactttgcaaagggatttagtgctaggttggacatgccaggttggaagagtgaactcagctgatggaaatgagtaggtcttttgggtgaaagacctaagacagctgcaatttgctgaaatttttacaactgctgaagagaataattgttcggaatttagtctttacagttcaattcaaagttggcattttgacctttcgcggcagagagaatatcaatttccttctgctgtctgtaagaaagagagcattatttcctcatttaaacttctctctttccttttacatttcttgccattaaaaaaaaaaatctaagcagagtagcccatgttttggccatgctgcctcaacacaaggagtgagttgtgttaacacacattgtggtgaggagttgaggtcttccttatgcctgagaaacagctgtttaatttgggtgcctcctaagatataaatgtgtgtgtttttggagacttggttatgtaggatgttcaggaaacggaactgtatgaatgctctgggcgttttactaaaatgtctggtgcaaaggtattttacgaacagattctcccaacatgcttccaaggaacacacatttcaatgatcgccagccattcagcatccatggagagtgctgcaagtaggacaatgataatttgatgtattgaatcttgccttctgaagaagaaacaatgccaatgggtggctacaaaattgaccacgaggaagaggactcagggaagcagctctaatgaatgctgccatgacaaggataaatccaaatccctgactttatctccactccctgtttcatctcacataccagaaagatttccaggggctttattttcatctctaagatgagaagggcaattgatcggggtgggagggcttcctcgctgccagagaaaaatagccttatttcttaataagcttcttaaggatgagatgcctgttgtcagtgctctgagtacaatgtgtgacatgtcaggagttcgtggagttaggaaagaagagtcatttcagtctgtggctgggagggggctagtgggacaagataaaactctggaaaacaactgcagagagatgctggtagagcaattgccactgccattggcagatgtcacctatcaagaccagctatgctatgagctgtccaccatgaagaagcaaggagatgcgggctaaggagacagcgcagggcaggaggtgaaagttaagcagatctagctcacgtactagttgcatggctctgaacaagttattagcaaatttatcttagcttcattccttttctgtaaaatagggctgatgatacaaacttcctaatagtgttgtttagataaatgaagccagtacccttgaagcacttacacaggtccagatacatggtaagtaaatgtgagttgttaaggttatgagtatttggaataatatcagcgggcattatatcacagtggctaacttcacagactctagtgtctctcagattctgtgtctttcaaatggagacacagcatctccatctgaagctgttgtgaggattgagtttgtataggtaactaaagagtgctcatgagaatgcctggcccaaggcaattgctgaagcgttagcttttagagtaagtttagtactagcctgagtactatcagtactaaaggatgatgtaagcatgggtcgtacctcttgaatgtgatgacaaatgatgcccttcagcagagattctgggggtagagaacaggggtgtgtatatcggggtgtatcctgaagaacatggattgtggcagcagaggtgacagagggggatttggttggtcatcttcatttggaaggtaaaggagaggaagaggtaacctggtgttatttctggggagcttagggtttttcccctcccagggtgactctgtgcctctgaaatactggctttgactcaccaggcatcctatcccatctgagagccatctgtttcttgcatttctagtttcatcactgagatcacagggtttaaaataagggtcaaaacctcctccagccacagggctgcaggtcaccctggaggaatgggctcttgcagggaagggccccagagctgggctgactgagctgccaccagcagaggaagaaacaggctgcactgtgataattgagcttctctgttggctctgtgggttgtcagtgccatgggatttagccttttcacagtactcccttgagaagatcgcagaaaaggggagacaatgatacagcaaaagcatttggaataattggccctcttctcactacaccacaagctgaggttgagagagaaaaggctcaaaaagaaaagatgctgtttggagagagacaaccgtggagaacagtaagggctaacaaggagcttcgaccttcaagggtaatgctgtgtggtttcctgtcccgcgcttgtgataggcagcctggcacacttcctctgcccagcaaaccctgatgcctcctccgtccccacccacacatactacctcctctcctctctgtgagcaaagtatgcttatttcatagagatacaaattatttgtaccagaacaaaagcaattaccgtttatgaaaaaccttctcacttctttgcaattggctaccatgactctgtctcttttaactgaaagtctgatgctgccattctttgagcaaactgctctcccagccctcctctgtggcccttggtccagccaacaccctgaggacagattcttcactaatccctttcggataatccctctcacctccaatggttgcaatgggcatgcaatcttgcatgggagacagtcagccagtgtagtgacaggtgcccacagctacttctttatcatattgtgacaaagcagggatgggctgaaagaagctgattgagaaattgatttttaccctgtcttgacttccacaggccctggagtttctgtactctcctctttctccttcaaggagcctgttgctataggaacctggcaggttgatttaattgtctctattgggatgcagacacctttaggcttttcccatgctgcagaagagccagacaaaagctttttctggtcatctgggatcttgatgatgctgccaagaggcatactcagtgtctctactcattgagcttacagggctattcccctttctcagaagccatgtgaccagcttgagaaagtgccaccaacacagcagcatcataaggcatgtagaggcactcatatttttttaaaaaaatcaaaccaagaggacaagggtaatatagaaaatggttaaaggtataaaaatgtgtaaagtcaatttatatcaaatatttattgagcaccgatggtaaggttctgggtcataatctttaatattcagaacagaatttgaaacctctcccaattgtggcagaagtttaactgtgtgtataagagtccagctttctccatccatttgaactggctttgggaagaacctgggtagcagactttagggacactgatgatgccacgatcacccaagtgttgagactgagaaggcttcaccgtgccttctggtttaccagcctacttattgttcacccctttcaaagcccaaagcaagttggactaaatggcttacaaatttcttctcttctagaatggtgcagataacagagttcctaactttttaaatgtatatactttattttcaaagaactctcactttctacccttacttccttgttttttttttttttttttttgcgggaggcagtgaacaggaagagatataataataagaaacttgtatgcctacttcctaagtaagcagatgttctactgaaagaggaaggggaagtttggagtcaaatagaaaacaatggaggggactcttcactctattaaggaaagtataatatagtaattttggcaaataaaattgaagtagtaatgatccttctccatcatcaaatttatcattagtcaaatatggtgaattctcaattatctaccactggggcatgactgtgtgcccaaagtccaggaaaacctcaaaattccatctcttatcatagtctgttcccattccattcccatcacaatatcatctcattggagttgctaacagactgtatataaaacgcacttcggatttacttctctctatctgcccggtctctggttgggatttaacaaatgtctgaaaggcagctggcaggaaagatttgggtaatacagtgactgaaccatcagctcccagataactgggtgtgggctactgagttgatatacacagcagaacacttttaatttgagtcatactgatcaagcataaagaagaccaatgcttttgccattaataaccctcctggtttaaaggaggatgaaatattgacagagaagcaagtttgccaaatggaatagctgtaaatgttttccagggaagtttatcaactggcatcatcacttgattgagtaggtcttgccaagatgaacacagagatgtgaacagaccgatggggggactgggattggggggtggcaatgggggaagtgaaggaagctgggtttcttgataggaaaatgctttcggacttggagcaaggtaccagggtgggcagggaggccacgtgcagattaaaaggcaagccagatggagagaagttccccccaaattacccaaccccacacccaagaacaccaaaacaaactctaaggaatctagcgatagcagcagcacagcctcattgcgctgagcaatttagaaagtggaagaaggaaggaagagaagaaggaagggaaaaggagagggaaaggggagggggggaaaagcaaaacaaaataaataaaaccacaaacagaacaatataaataaaaataaacaaaccaataacagaataaaatttgtaactcctttttttttaatttcacaaaagttttcacaaggacaacgttatagaagaaaacccccagcagtggctaggtcatgcagaaccattaattgtcataccttggcccattctattcatccttgttgcactttagagagagaagtaagctatgtgagttttacaatgcttttaaactgtcatatttcctgttgagcactttaactggcacattcttatagttataaatgttctgagggcgtaactttataacctcctttgcaaagaatgcatgaagagctcttcatgatccaatactaggggatacatatatatagttatatatatagttatatatatataattatatagttatatatatataattatatatagtttatataaagagatagttatacataatataaatcaatatatagagggacaaaaataatttgaaaaaattcttccactcatagggcttgataatttacatgtatacaattattccccaccacaatactggtttgaatactacgctgcccctgtctttggtgtgggggagggtggaggttctgactgagcctcaccatttgtcagtaaaagtgcttgtcaattcacacagcaagcaaatatccaaaactatcatgcttgaggggacgggggatccaaaatctaaatccaaaacattcaccataaaaacacctttttagagatggtacagctgtgacatgttttcctcctcccttttacccctattctattcgatggaattctttgaagtaaaacttttcaaatatgtatataccagcctagtccatccataagggaaattggttatggtgaattggccagtttttaagaaataccgcactgcctaaagcatgatttgcatgcacaaagcatctgacaactatatgttgaaaaaagggtatttttctacctctcctctcatgcttactaagtgttaaaaaagaaagaaaacaaaagaagaaaaaaataactataccaaaatgtgtttggctcactgttgcactcttcttatcccacgtctcataatgacaaggagcagctctctattgccgtcattaccctgcctaaattggctacattaaagaaagtgatgatgaggaattccttcccaccagctttctgcattgggacagccagcaccgcacagctgtgccaacagttgaaggtggtggctggcttttgtctttgttgagtcaactgtggctgatcctcctacattctaatttatttagcatgtcggctcctagaaaagcatgatctgcagctgggtttgtcttcctctcactctaccattgccccagcccttcctcctacctggcattggggccctaactaatcaaacaaaggggagtaaaaagatcccctgagaatgcatggaaaaatacttgctctttcctgagcattatttattctgtacataaggtaagtaattcaccttttaaaagatgtaaaagtcccaggaaggcagtttttaatgacttacatctgatatttatgatacatatggcttttcatcccaaatgtcaaaagtgaaagaaaaaaaatagctattcatatggcaacataaggagacagaataacaatttaatatgcaatcaaacctcttttcacttaaactaaatgactagaatttgatacatccatgattggaatactattctctcctccatattaaggtgagaaatgttcataagaactcccagagggaactggctctgggacaaaaggccttggtgagtaactaaaaaaatcactgatgttctcttgcaacaagcaggtccttcataatcatctacacaaatcgtgaaagcttttcaaatgcttcgcaatacttcggcccagagactggaaacaatcaatatgttttcattgctgtttggttgcttgtttcaaataaacatgtgctaacttattgtgtgtataaaaaaagaaagaaaggaaaacaacaacaacaacaaaatcaaaacccaaagcaccctgataatcctgataaatcagaatcaacttttcttttacattaaataaacttgctctgcctaactgacgttgatcacaagtgctcccttctaatctgtgaactcgttcctgcagtgagctatttatgtctggagcatgcctttgggttatttttcccccagaatcataaataacttttggtccgtctgcttatttgctgttgtgctcaagggttttatggtggtgaaataaaaatgacaaccacatgcacactatcatacatatgcaaatatgtgtaaaaaaaaagggggggactacaggggaaaacagggaaagttactttgttggaaacaccaactggggaaatgagtggcagatacagtttcacacagtggcggtggatacacatatcaaagccgctcttcctgcacgtacttctgtttgtcccgggactccctggacttgggccggttctgtcggtttgctgtggatgggatggagtgaacagaggagctcttcttgctggaggactgcgacgagtgggaggaatgggacaggctggcccgggactggccggcattgtggtcaaactgcattaagcagaagatcaggtccgtcggcacgagctcaaactcatagggcgggttggtgatgacatacctggacagggaaagcagagatgtcacctcctgagagtaactgagtaaagaattcaactctctctgaaccaaaagcaatggcctggttactcaggactttcagaggatctggaagatgcactcctagctggtctgaggccttaaacattctttttcttgttaaatggaaacttcctctgtttaactcaataaaggaggccagccaggagcccaggcagagatgtggaattagagccagtaatggaagaaccaaacttcgcttctcgtggtctacatgtacctttctatacaaggtcaaagtcactttcaagtagcccaaccgcaagaggtttcatgaagtgtgatgcaactttcatttcataattttcggacaatcccagatatacatcacaagatctttgtttaccatgacagagtgtctccttagactattctcgctctttaccttttaaaatctactttggtgagagaatttggaatttggaattcaccacatggaagaatctaagaaacctgcctacttatcagcactactttgttgttcttcacaattagttggagctttctttggtcaacagcagatgtgactaagaaaatcacgctgtttcacttagagcagtggtcaccaagtgtggtccttaggccacacaggtcagcatcacctaggaactaggaaatgcaagttcttaagcaatcccacccagacctactgaattggaagtgctgaggatggggtccagcaatctgtggttgaacaagctctgcaggtgagtctcatgatggctaaattttgagaacccactggtctatagcaattgttctcaattctggctatacactataatccctggttattatatataaaatgtttacataatttaaaatatatatatgatgttttcttccttccagaccagttaagttagagtaatcagaatattttttaaaagctccccaggtgattctactatgcaagcagggatgagaaacgcttgtctctgcagcactgttgcctagggtatattatgcaaactcactgatcttggtaattctaggatgtacttttaatttttgcctgctatgaatttattttaatgcatatgagaaaaatataattggcacatctaaactgttatttctctgcttaaggtgataatatataattgtctcaaaaataaatatataaaagttaaaaagcgagtcaatttaaaatatgtgaagtaaaaatatgggattctgagatatggcagaagaaccacttatcttagggcggggtgtggtggctcacacctgtaagcccagcactttgggaggccgaggtgggtggatcacttgaggtcaggagttcgagaccagcctggccaacaagccttctctctactaaaaacacaaaaattggctgggtgtggtggtgtgtgcctataatcccagctactcaggaggctaaggcaagagaatcactggaacccaggaggcagaggttgcagtgagccaagattgtgccactgcactccagcctgggcaacagagcaacactccatctcaaaaaacaaacaaacaaaaaacaaaaaaacaaaaaaacttatcttaaacactagcaatgtaaaatatctctatattaggtaccaacagatgttatcctagtagctagagtttgggagagatgtttgtgtattcagacttttgtaattaggtgatggaattattctattaatacaaaacttgaattcttaccaaaatgtctttacatctactattagtaattatagaaaaatgcttcccatcacctccaaactcagtgttggatttaatatgggcagagtaatttgcatgttgaggagatgtatacagacctttgcctttacagtaggggacaggaaaggatattaatatttctgtgattaggtgggagggcagagttgaaaccaatactcacctctttgtgcactgactgggggtgctgaggtgagcatctctcagccggtaaattccaaaacaaagcatattatatgttttcagagctttgcagaacagatcaccataacaaccaccatcctgggagacagcaaaagaacagagagaaacatcctttttatttgcctgaaaatcaagggacagcagggaaacgggtcttttcatcaaagcttgttttggtgtctcccaagttggagggtccatgtgccaagggacggcagtggaagaagtcaacatgtttaacagactacacccaatatgtgtgatttttagggatcaggtaacaatggggttttcctctggtgtctctccagttttccacctgtcgcagtggggtttgaaagctctaaggagattatgcttctccctcactttaagtcaaagtgtaaagcttgatggtctcagatgtatgctcagctgaggagatgaacccttctctgcaaaatggtgattatgttcagtcccagctcagctgtaaccgctgtgataggctcgtgttgtcaaaactgtctgagtgataatgaaaaccaccgcaaggaggaggaccccaccaggtcctatggtgacagactctttcaggaggtaaggaccctgtgaaaagcacaatttacagacctcagagatggcaagggtgcaagagaatgtgtttccctaggagccaggggtctgcaggctgaataactaggattcgcagttctgatcagttcacagccaccttcccggggtctggggcctgatgcagaaagtgaaagcaaatgcatccacttggaaatgctggcttcagcggccaggtggcttcaggtagatgttacctgtattatatgaagggcactgggcactgcgggatggcttcactgggtataaaatgactgtctttgtccttccaatcattggaattctcatattggtctcataccaaagaacactgatgggaccaaatcttaccattatctaaagtctttatcctaatcaagtgcatcaataagtaaatgataggtataaagagccactagctatgaaaattccctttcaaaaaaagcctagtctaacataggtcccagtccatgatcaaactaaaatatggggaaagtatgcagcactgtttcagaaaaaacagagacagaccctttccttggctccttttccactatttagtctttctgggcgacaccattgtttgtgtaacaggtttatcagtttctgtgacttatggctgcatctcttaaatgcatctgtggggttgggctgggaataagggcaaagacagcacacttctgtcacagtgcctacactaggcagatacatggaatcagaagggagacgctggccacttccgtcacagggaggacatgagggaacgtgactgggtccactctcagaaattacaaggtctaggttttgatttacaggcattaaaggatccacataagattcggtttgtttggccggtggttctggatacatctgactactgactaccctggtgctttgaaaaccaccagtgcctgggtcctattcacatataaaaactaagaaacctgcaggctgaggctggccacctccatgtgctattaatgtatagttgggttgagtatccctaagctacgctaagagcctgtggaaatatttcccaaccttggctgcatgctggcatcacctgctgcttctcaccttgtgcagaggatacgtgaagagaacaccaaggagggagaaagcccactggctctgaagccaggatgccttggtgcaaattcccaataggtctagtgctcattctctctgggcctcagttgacttagaaggtgtgatactagaacttatatcaaagggttgctatgaagattaaaatgaatgactatgcatagagcaaagtgtctgatccagagtaaactataaataaatatcacctcttacagttatctacaataggaaggagaaaagccagatgcctagcttgtcacatctgataccacgttcttcaggatcaagcttttcccaaacagcaagctcaggtgacctcggtgctgtggactcacccctaagtccgcaaatggcccatcgagcagagctaactgggccacgcggcagcggtccctattggccagtgtctgcggggtgctgtagccacctctaagggcgttttcctcagcaatcagagcctccagctccggcgtggctcctccggtcaccagggtccgtatcagggtgaggatattgtcattgaagtacgtctggggaaggagagaaagtgagggaaaagtcctttaagcaaacaccctaaagtcatgacagccgacatccaaattacaacttttcttggtatctcctgtttaaagttctggcctgtctcttcaaataatttcatgtggggagtgaaaagacagcagcctccaattattccgttattttctctcttgcttggctctgctacgacagcctgacttaaaaaacccagttcaggggattttttagtaaagggctcaaatctgaataattagtgtttgccataattggttttagtagggatacaaatattgcctccccctcctaaagtctacgtgactactatgagattctggacacgtgtaataaaatgcagcctgccccagctactaacccaagcagcattgtctctgaggccctgtcatccatgtgccaggaagcttcctccccacgacaacggcaaaacctttcattaatgccacacgcttaacgatttaccacatgcgttgataactgtctaactcagaaatctcgatcaattaaatatgccggataaatttatgaaaaggtgaatgtcctggtaagtgtactttggcttttgttttctaaaataacctcagtagtctgaggcaaatatcacttattaaagaagtttccctctaagtgtacatttgtgtcacatctgaaacataacagatctgtcaggaacaaaagaatgggagtttaaaaaaaattaataggatgtcaaataaaggagctttaaaaggtatttgtcaccagcctaatttgagaaattctcaggtaagggtgtgcattccattttcctatgtaagtagaaatcaagcaggctaaaaaactcaaatcaaagtttgcctgtggcttttgaggatgcactttggaaagaggtaaggaaagatgcaattgcacctcagcagcttcttagagagtttagctggcaaggcatagtagggaacaaaccaagtaagggtgagctcaagttcccatcccaggtttgctaactagttctatgtcttggaggttgcctagtcattctggactttgatttttctcgtctgtaaaataacagtggtcattaaaaccaaatttatattcacataattccatgaggacttctgaattaagatgatagttactagcggggctggattcacaatcctcattgaaatacttacaaaaacacccattgtgatacaaaattccaactgcaaaagaatttaggaatgttatccatagcctgccagaccctaaaggaaatttatgctcagagttaagatatgcccttaggcacagaagcagaaaaaggatacttaaagtaggatatgtttctggagaggttatgggatccagggatccagagctgggctgaggggtttaatgctgacttcacctctcagaagctgtgtgaccttggaaagttatttaacatttttgtgcctccgtttcatgatctgtaaaatgtaataatagaaggctgtggggctctatgacctacccatgaagcacttagaaacatgcttggtgcacaggaagcactgataaacattttggcctcatatcagagacatgaggcctttgccaagtagaggaacagtcagctccattctcaactttcctttgaatttttaatcttctttgttttcttggaggcgtggggaactcagggctttaaaaaccaagcaagggattttaaactcgatgtggtagaaaatgggaggtcagccaagcatggtgcacacctgtaatcccagaactttggtaggccaaggtgggaggatcatttgaggtcaggagtgaggtcaggagttgggaccaggctggccaacgtggtgaatcctagtctctactaaaaataaaaaaattagctaggcatggtggcgggcacctgtaatcccagatcctcgggaggctgaggccagagaattacttgaacccgggcggcagatgttgcagtaatctgagatcatgccactgcaccccagcctgggtgacagagtgagattctgtctcagaaaaataatgaataaaatacttagaaataaatatattgaaggaggaacaagactggtatactgcaaactacaaaatattactgaaagaaattaaagaagacctaaataaatggacagacatcccatgttcctggattagaagacttgatttattaagatggaatactaccttaatttccagattttatgtaatacctatcaaaatcacaaagtccatttttttgtaaaaatggaaaaattgactctaaaactgcaacagacccaaaatagccaaagcaatcttatagccttataaaagaaagacgaagttggaagtttcatacttcccagtttcaaaacatactacaagactatagtaatcaagatagtaatggcataggatagacctatagaccaatggaaaataattgaaaatccagaaataaactcattcagttatgatctattaattttcagtgagtgtgccaagaccattcaatggagaagttaatatagtcttttaaacaaatggcatagcaacaactgggtatccacaggcagaagaataaagtgggacctatacctcacactatatgcaaaaattaacacaaaaggggtcaaagatctaaatgtaaaagctaaaactgcaaaatgcttagaagaaaatataggagtaagtctttatgacctttgatttggcaatagtttcttggacatgacacaaaaagcataaactacaagaagaacagattaaattggacttcataaaaatttaaaaaatatttgttctttgaaggacactatccaaaaagtgaaaaaaacaacctacaaaatgagagagcatgtttgcaaatcatatgtctgataagggtctaatattcagtattaaaaagccttttataactcaaccaaaaaagacaacccaattttttaaacgggcagaagacttaaacatttctccaaaaagatataaaagtggttaataaacttatgcaaagaggctcaacagctctagtcatcagagaaatgcaaatcaaaaccacaatgagatattttacacctactagaatagctgtaataaaaaagactgatgataataacaagaattggtaagaataaggagaaactggaactctcacacactgctggtgggaatgtaaagtggtgcagttaagggaggagaccacccctcacattgtgttatgcccaatttctgcctccaaagaaagaaaaagtaaacattaaaaggcagaaatgaaacccacaagcagatagcccggtgccacaccctgggcctggtagttaaagactgacccgcacttaatcggttatgttatctatagattacagacattgtatagaaaagcactgtgaaaatccctatccttttttgttccaatctaattaccggtgcatgccgcccctagtcacgtaccccctgcttgctcaatcgatcacaaccctctcacacgcacccccttagagttgtgagcccttaaaagggacaggaattgctcacttgggatactcggctcttgagacaggagtcttgccaatgccgctggccgaataaacctcttccttctttaactcggtgtctgaggagttttgtctgcagctcgtcctgctacacagtcactttggaaaacagctaggcagttcctcatatgtttgaacattgtgttgctatatgacccagaaattccactcttacagtatatacccaagataaataaaaatatatgtccatatgaaaacgtgtacacagatgtttatagcagcattattggtaatacccaaaaggtgaaaataacccaaatttccattagctaatgaatgcatgcacaaaatgtattatatccgtgcaatgagtattatttggccgtaaaaaagagtgatgcaatgatacatgctacaacatggatgaaccttgaacacattgtactgagagtctatcagacaaaccacctctgataattcaatgtacattcgtttctatttccttaagtgtcggccagtctgagaaataaagggaaagagtacaaaagggagaaattttaaagctgggtgtctgggggagacatcacatgtcggcgggttccatgatgccccctgagccgcaaaaccagcaagtttttattagcaattttcaaaggggagggagtgtatgaatagggtgtgggtcacagagatcacatgcttcaagggcaacaaaaggtcacaaggcaaaaggtcagggcgagatcacaaggtcagggcaaaactagaattattaaggaacttccatgtcctgctgtgcaggcgttgtcattgataatcatcttaacagggttcaagagcagagaaccggtctgactagaatttgccgggctggaatttcctaatcctagcaagcctgggggcgctgcaggaggccagggagtgtttcatcccttatctgcaactccataaggcagacacccccagagcagccattttagaggctcctcctgggaatgcattcttttcccagggttgttaattattaatattccttactggggaaagaattcagcaatatttctcttacctgttttcagtaataagagaaacatggctctgttccacccagcccacaggcagccagactttaaggttatctcccttgttccctgaaaattgctgttatcctgttcttaaggtgcccagatttcatattgttcaaacacacatgctttagaaaaaatttgtgcagttaacggaatcatcacagggtcctgaggcgacatacatcctcagcttacaaagatgatgggattaagagattaaagacagacataggaaattattaagagtactgattggggaagtgataaatgtccatgaaatcttcataatttatgttcttctgccaaggcttcagccagtccctccgtttggggtctctgacttcctgcaacaagagtctatttatataaaatatccagaaaaggcatgtctacagaaataatgagtagatcagtggtggcttagggttggtgggttgatgggtggagttgtaggggagggtaggataactaaaatacaaagtttctttttgatgccatgaacatgttctaaaattgactgtagtgatggctgtacatgtctgtgaatatgctaaaaaaaaaaccactgaatcgtacactttaaatggatgagttgtatagtatgttgtgtctcatttttttaaaataaatagttaaaagacaactaaatttgcactggccaactttttaatctaaggagccatgagtattagaggtgaaaattacacacacacacacacacacacacacacacacacacaattagtgatacggaagtaaaaccaggaagttctaagctaaatagagaaagatatagggatttttgtttgtttgtttaataagagtgctggttgatattgagaaaaagacaacaaaggtcaagtgataaacagtaagtatttacaaatcaaagttgtaaacaaaatgcaagcgtgtaaaacaagcaaacaaacaaataaaaataacctgtcctgagctgggaaatgaatctaggatgcagatcaaaagcattcagcaagttaatgtggccaactcctagacctgtactcggtgaatatttgaattcaaaatattaaatggagaataaaaatgacctaaaacaatgctgtaagaaatacaagtataaaataaggctaggctgaagcttctctagaaaatgtaagaggaatgtcaaaggaattttgacaggacacatttgttccaaaaattctacatatagttaaattgccaataatttgtgaaggcaactgaaatattttttgactctttgcgtacataagcatttattgatttaatttttttaaatacttagaaacaaaaattagcttctttaaagataattttaaacccttagtaactaaaatatgagcaaatttggtttactgttaaaatatatttaaaacagaattgtaaaagattattgtatatattattacaaaatggaatgcaaatgtcaaaactaattattaaaaaaatgacaaaactagctattaatatagtattgctaaaattatgttttaaagttagaaaaatgagatgagatagagatgatgatggaaataaaggcatgaaaattgcctgatcttatacaaggaggaatcaagaactactaaatttttctagacaataatacttagaaaatacatctatagaatggctggtaacaactaactagagttaaaaatagaatggaaagtttacactacagaaaataagcatacaaaatatagtccacataccaaaagatggatcataaaacatataattatgatagaagcatgtaaaaaacataatgcaagactatagcatcttatgttatataactaaacataaatgagctaaatgatcctataaaatggcaaagattttcagacttgttcaaatgccaaaatcaaactctgatatctttaaaagagaaaaagggaagaaaaaaagtatagcttcaaagaaaaattttaaactattatgttagataagttaattttatattcatagttgacacaataaagctataattttttatggacaaatattataactgaaatatagaaagcaaaactaattagaattacactagaataaatctggactaagggtaatacgtgaaatattcccactatcactgtttttagcttttacaggccaaatagatcaaaagataagaaaattgaggatataatcaggttgatttagtgtatttttactaaactttgtaacaacgattacaaaaaaaaaaatcaatggccaaaaccatcaaatctcaatacatataacaaagtataagctgtataacctacattttaaaaattaaatacaatgtaatagaggcaaaagtaaatattccagaacatcaaaaaaattttgttaagtatcctataactactaggtcaagatggaaatcaaacttagaatatgaaatattttaaaattaaagaatatttgagaatgacatataaaaatatcatgtcttgaggccaatgctatagagacaaattcagagcctttaatgctattattaaatacaacagaattataataagtaaaattaagtattaaaagaattctttttttaaaaaaaagcaggatgaaaagtgtcagttaatgaattagcaagaggatatttagtgaattgttaaattcaagaaataattccttgaaaaaataaacttatgacaatataactgaaaaaacacaaataaaattagaaataaggagaataaaatgtcagatacataggagaattaacagtattattccagatactctctttaataccaatcactggacgtgaataagaatcgctactgtttttaggcaaaaagcaaagtagtaatcatctatgaagagacagaggagagtattaggaaaaaaggaaaattccatgttccttaacatgtaaataggccatttaatgtcattttttccagtaaaattgttgtttgacatatgtgtaattgcagatttgaattggactttttaaaacttgataaaattatgctaaatttcccctggaaagagttgtacaaaattgtcctctcatgtagtatagtaaattttaaaggtttcctaaccaaatattgtagacaatgtgaaaaattagaagatcaaccagaatggatttatgagaaccatagcttagtagttataagaccttaatacaaaagttggcaaatctggctcttgggccaaatcttgctctgccatccattacttttttaaaataaggttttgttgggacccagccatgtccatttgtttatgtattgtctggggctgctttggtgctaacaaactcagagttaagtagttgtgacagagactatgtggccctcaaaggctgaaaatatttaccatctggctctttacaagacagtttgctgatccattccttagtataacaaggaaagcattgcataccacagggaagggattttactcaatgaatgatttgggggaaactggctctctgataaaaatttttcaacaatatggtaatgattaaacaatggttctttgacatgactcatattgtacagacatgaatattgtgctttcagataatatttaatggcatggtaataattatataatactaaaatgttttttaaaagtaggatccccaaaacaccatgaatcacaattcatgttaaaaatgcatacctgcaaaactattggctagggaaattaactttttctgtatttaaaatttaattttaagagtacccacttttaaatattgaatctttatggtactgggttttaagttttaatattacttttaattggctttttcatactaatgattccttttaatgttttcaattatcatatgtttataaaatgtagagatcatttttattattaaactttataatgtacactgtttcataatataacaaatcatgcacttattactttttgaattattttttaaatataaatcttcaatgtttaatggaaagttatcagaaaatgatatcctgtttattattatggtcactcatttatttctaccataaagtattacaaaaagtacataatgctctgatttggggacttccagagggaaaaataatgcatacctgaactgatagacgtatttatgtgaaagtaactgtaagtagtacacaaaatttctacttagtagttaattcttggttttagaatttggggtttttttcctataattttattttatatattttctgctgtgaaaatacatttattttaaatttctgtaaaaaagaaagtaaatgttactaaatagttaaaggcaaaaaatgtagccacaaacaacttcacaaaaatatagcaaactgtttaatctcaagatgcttgatagttctcatgttcagcatgcactttttatgcataaaaactgaattcactatataaaatatgtatttacatcattatatacagattaaaaactgatatgcttcaaaactatcataaacacaattaaagggcctcctaggaaaaatgacaatcggcatttgccataatgtatgagatggctcagtatgacgagagtgtggattggtaaaattgtttcttggagatatcatgacaatatgtatcaagaaattttaaaatgtccctatttgttaaaaaaaaaaaaaacccagtacatttgcctcaatataataagttgctacttgttcaaagatttatgtacaataatttttattacaggattaatcattgctataacaaaaattttttaaagctaaatagccaaaaatttagtgataaatcgattctggaacatccacagactggagtctcataaagtcctatggaggctctgcaaatcatgacacctaaggaaataataaaatactctggataaaatattaactgaaaagggaaaaaataaccaacctataaaatgagataattctgtatttatccatccatttagaaggaaagacaccaaaatattaaccatgcttatccttggtgttggaaacataggccatttatattttcttctttatatgttttctttttatttttatatgtttcttctttatatgtcttcttttatatgtttctgtgctttccaaattttcatcaagaagtatgaataactgttctaataaaaacacagtcaattttttttaaacaaagggcactataggttatccattgcaatgataaatctagaaggtcaggctgggaggttattgttttgtcaaatctttgggatttgaccctaacatgttcccacttctgtgttgaaatcagttatacccaaatctttttgatcagtcactgacatttattgagcacctactaatcgttgggccttggtttagcctgaaattgtgtgaaagtcaaagagtgcatgacttttagaattgctcatcaacaggtacaatttcatagtcagtcccagggtttcacaggtgtctgaacaactctgggaccactcatatctctgagcataattgtctgctctctgagctggcactgcatcccagatgatggctctccttgatttttccatgcaggcatccaggagcagagctgtggggcagcagaatctgtgatgacagagaatgatgatgtatttttgccagcagatgcttttgctcctgttttgataccccaatattcggatgcagaaaaggactctgagcattgctgacgggtgtgctctgcacacctatctcttcaggatctgaataatttggtggaaagacaatgccttttctggaaaagggtgtcaggtcagtcatattggaggatgcaaatttccttatgtgatgggagtgagggttggggtagggcacttcacggagcattcagcagtctgcaattaagcatcactccaaggctttctgcataggtgatggctgtttctgcatcatggggcaaaccaggtgctagaacttcaaatgccaattaccaaaggcgcttcctgcggaggaaacctctctacaactcacctgacccagaaggcacacatttttttctgggttaacataaatgctaaaattgaagaaatgaaacattctaaaggcaggatcatgtaggtgagatcctttgcctcctaagcttttgtcctgccagtcttttctgtgccttaccatgatacctgtgctagaagtcttctgggaagctcttgtatagaacctccaactctggcagggttagtcttcagggatgcttcaggcagagaccttctcaatatctatccttgcgtcacatgggcattgagtataagacagctgagttagggtcctgttcagagcctgggatcagggaacccgcatagtctaaggaatacaggagtccctcttcccactgccaaggacaagtttgcaaacctgactagcgaagcccttcttctgattaaggcaacgtggccccctggttatgagtacagatttccaaatccaattagtgtggcttttaatacctgctttgctatccaataggcacaacaatgaaaaagttgcctaacttttctctgccttgaattcctcatccatataacagagatgaaaaaacaaaacaaaacaaaaatttatagattagagttaaatgagaggatttgtgaaacttctgatagacaaagcatactcaaaaaatgggagtttataaaaagaaccatcaactagcaatgcaaccaatttagacaattccctctccgggtgtctcggcgttctgattctaatctctgagagctggctcagaacacaagggtggcccgcttggcctctaaagtttgatgattctcaggtcctgtaaaaggacactgaggaaaccatgaaatgccaggggagggaccaaggcactgtaacagggaaacctgagcccacagcgccatctagcccgcttggcccacgccccgctgtgcctgcaagtgtaacccgcccaagcatcctcctctttttatttttttaaagtataattaccggagcttatgtttcacagttaatgctgtcaagccttttaaactaattggtcttttatagaaaatttaactgaaaattaacacatcttttaataacattgccttaactttaatggctctctgcctttcgtttataattgctctaaaattgtcattttccatgtcatagctgccattttttatatttgctagttttcatggtgtagatttttatttttagtatttttctttcgtgagggatgaaaatgattggatttttttttccctaccccaggcctgcctggcctgatgtgacagcagtggtctgtcctgagtctagcaggacatacctccatgtacccgactgacaccactgctagctcctctgcctcgggacggccatgtgccctctgtctccgtgtgagcagttgaaatggaggctcttgagtggagtgtaagaaatagggttatggagcaataaattgtttatgtaactaaaatcacatggcattaggttagcttggactgatagagaactcaggcctctccataacaccaggttcaagggtttggcccttaatgaaagtacaggaaagacagtaaatcatgtgaacccacattccagacggtcacaccctccagtcttactgatataacttcgtttctggcaaacaggccagctctctgatattaaagatgagaacatggaatcatatcttctgggtaccccaactcatctacccactaagctcccaaatattatctaagatgtgtgttcatgaaagagagaaagagagaggataagtgcacacaaacacataaatatatatacatatatgtacatgcatatataccaaaaaaatctgcttctttgtaattacatgtgatcttaagaaatacgtatctgctctgtgaaagatttttatatgcctttgccattctccaattagcagaaagtcataaggagtaacatcattcccatttaacagtagaaaaaatgtgcaagggctgccggtgagccaggaccagaagctacaagtcctaattcatggcccagtttccctcctccaagtcactgcctttgttctgaaaatatgaatgcactggacatgcaaactcctgccctgggcattgtggtgcagtgggcagagcaaagacacacctgccttaactggctcacattgaaatttctctctagctcctgggggatcctgcgcatgggtctctccataggctggcattcacgcttctcagatgtatcgtacactagcaaaaggggcctctgcttttctctgctctttctcttaacactgttataatatgctttttctttatttttccagattaggtaggccctgcaaacctaaagcttcattaaatcttgttttctaaaaaaaaaacgacaacactcccaacttgtgtgcattggaactcattagctcttgtagtagggttcccctttttctcctcagaaggaggtggctcctcactgctccttcaataacgatggttcagtgtgattggtatctgtttaggaaaggtccaaggctcaaggaaaatggacatcatgtgcacaacctcctaactcagaggacaagcaagtgaccggaaggccaaggatgctgtctgaccacagacattgcaatgcagacacataagattagaagcaaaacgcaggaggctggtaaggccaggacagtgggatgaaccaagcagggaagggacatgaatgaagcaggcctggtgggatacaatagagagtagtgtggactgtggctaaagggagcagctgctcagctcaagccaatagctgctttacgggaatctgggactctgccttctgactctaatttaaagaaggcaggaaccccgattttatataaaatcttattttaaaatattggcaacaaattcaatttaaaaataaaaacttgataaatgcagaagttgtctgtggggtagatgtagactgcaatgtgacatttcgagacttctattacagatcttttattagaaacaagatatcaagccaagtactatgccaatatattgtgctatttcttcttctaaaatgagtgcatgaggatggggtgttggacaaaaaaataatcaagggttgcgcttcaggaatcaactcagtgatgagctcactgtcctagccagcgtatccagaaacagtggcattaggaggaagctggtggctttcagaagaaggaggatcctctcgccaagtctgaagtgtctcattccagacttagaacttggccagatgtggtctattgtactcggaatactcagtgtggccagcggccttgccttcttgattgccttcctgtctaccacattccaaccataatggcctccaactgcttcctccaacaaaccaaacccagcttgtcaccactgtgcagctttggcctttatagtgttctctccctctgtttttttcagtgtcagcttcaatgttacctcctaggataattttactctgaccactgagggtaaaacaggtctccacacccattcaagctatttcatgttcttcaaatcaattatccttatgtgacactattcatttattcacttacctatttactcttaacccactagaatgaaagtttaaataacatgaaggcaaggtcttcatccttcttttttacaactgaatccgcagcatggggaatcatgcctggtgtccagtaagtgcccaataaatgtattgattaaaaacactagcaacaataaatacatacagagcttgtcaagtgctaagcaccgctctaatcgctttacaacctttacccatttactcatctctgcaaccctgtgacataggtactattactatcttcattttaaagatgagaaaactgaggcacagggaggttaaggttacccagccagtaaacagcagttctggaatccagatctaagccatctggcgcttgagtccatgtccagtattcacttttcagggtccaagtggagcttaagttggggctggggttgggagaaagtgatagctggatgaaaaagaaatctgaatactcatatgtgagtctcatccctaaaaacagagaggattcctttcacctggtgcgactgtgtgcatcaagatggtatcattctgaaaaatacatttctaagttgtgatcttcttagagacatatatccaaaaacctaattattccctctcatcctgtgtttctgctgttgatttgtgagataaagccacagggccatgtctgtaacatcctgatctgttccaggaatgcctgtgatgaatcaaaatattattcttttaacaaatgaagcagtaagcagcaggagttgggttatgaaggacaatattcagagaatgtttagacacatgattaaatgacaatttggggaggagcgctagaataaggagactgtcaacagctgaagagatttgtgtgtggatgttgtgatgttgcttatgagtgaatgcctgcaatgaaagtttacctctgtctcctgctgtttggaggagtctcactttctcaatttatattcatgacagccctttttgttccttctagttactgccttggcacttgactaatctgttttttcatacattaaggttggggtagaatgcaaagaaatcacaggtaacattttaccaaaacgtctggatccaactagatttgtggactcagaccctactcaagacctcattatgaagcttgttcatcctagacaatgaaaacaagacctggaataatttgataggcattttgattaatgatttgaaaagttaccatcaatgacttacttaaatatgtcttgcttcaacacttaaaccaagagtattcacattattgtccaaaagattcgatagtgtagctaaagtgcctcgcacagttctgggcccttagtaaatgatgctcctgatgataaatacaatgacagttaccagattcctgatacccttttatcctaggctagaatgcagaagacatgctgctcccatactattgcatccaaacatgccttagtcacactatcccaaacatttttgtgtgcatttcaaaggagatgagagatggcttgtttaaaaatttcaaatcaattcactttgaattctcatttgaatttccaagaactgactacctactgatgatatagatgcttgtgcaactcaaatccagatgggcccccacctccaccctgtggctaccatatgcccctttggctgtgttgaaaagaagttctccagtgctcaaaccgattttattccttggaaccagggctggtttcatgggtgttcagcctatgtggttgcacagggctgtactcagacacatctctgttgttttattttattttattttattttttgagacagggtctcattctgtcacccaggctggagtgcagtggcgctatatcatctcacagcaacctccacctcccaggctcaagcgattctcaggcctcagcctcccaagtagctgggattacaggtgcacaccaccacacccagctaatttttttatatttttagtagagacagggttttgccatgttgcccaggctggtctcaaactcctgggctcaagtgatctgcccacctcggccttctaaagtgctgggttacaagcggtagccaccgcacccagccccaagtctcttttgttttaatactctgctgtcaccattttgaaattcttaataattcatgaaaagtgaccttgcaaattatgtagccagtcctgctagaaacatactaaatatctgatatgtagaaacataaacaattttataaatttggaattttaaaaatgttatcagagtattttgtagttctgaaaaaaaaattctactgtaaatagtttaaccagctcttagaacagtcttctgagatctctgtaattaggatcagaactaaaataaaaatttctaatgagatgaattaccaaaatccatttgaaactggatttgcagaatatgaggcctatgactgagaatatggtcttcttaggaacacatcttgaggcttctatcattccttctggcttgctcaaggagtttgcccaaactgagcccaacatcactagcaggtagaaaggttagccttggtatcatcaggccataagaaagatcatgagccccaggaaaccaagggagcccttttccaaggaccattttatctccttgttggcttggaaagccatggcatggcatgaagcccagttaaccttaattcagacgaatgtcatttcacagtcatttttaaatccaaaattctgatttttaaataagatatgcttgcagttggacaatgttcaggcatacagaataacccaaattagtcttaaaaagctttatgttttttctttcctcaaatagaggtccttctgggattagcattatttaatgaatagatgagaccagtacataattagcatatcagttgtttagcacattcaggagaataactttcagcactttaagaaatatacgtgtgtaaaaactctgagttctgtttatggttttaatgtgttcagaaaagctctttatcatggattctccaaaggtcaagtttttgttcagcctatgtctgcattttcacaaattgagaatttgagaactccaaaatgaagaagattttctacataataaataaagatgctcagtgggaagacttcataatacccaggttatgactcattctaaatgcctacttttgccttttgcagtgaaagatggctccataatgttgggacccattttttaatcgttatttgtttttcggttgcaaaagtgaaaaaacaaatgcctgattgctagatgcacatcaagttataaaagaaaccaaagctgtgtttgatccctgggccagcccactgtcctctctctgccactaactcctccctccttccagccaggccttgcctccatgcctggttctctcccaaggacttcagtctcagtgacaggcctggcagtcatctttgacccactgtcctctccaccttctgctcatgctcaatcttttcccaagtcctattaattgtactgcccaataccactgagctccatccacctccctcgatcccaacaccagctctatcctagtccaagccatgacagcctcttactcagacctcctgccgccatcttgtacctctgaatcatcctccctacaacagccaaggcaatccccttaaagcatgaacctgattatgtcactctccaactaaaatccttcagtgcctcttcattattcttaagaaaaagtccaaaaccatgaaaatgtgtttcaaggttctgcaggtctaaccttggccatcctcctgcacccttgtctccccatggtccagcctcacagggtttctttgccttctttgagagcctcaggtcccccccaacaccaggttttgcatttgctttctttcttcttcagagaatgctcttcccccaagatctcccctctttatggctcaaattttagcataaaatgtacaactcccttggggaatttttctgggatccccaaaaccaggtcaagccctcacctatatttccttctagcctgccttgccttccttgcacttgaggaatttataatcaaacatttacttgtgtgatggttttataatgtgggtctccccttctaaggtgtgagcttctaggagtcttgctctccactgtggccccagtgcagcccagggcctcaaaggttggaggtgctctattggcacatcctccacccttgagtgaggaggagggaacaggataactcaccgcgctcatgagtgagtccaggacactgacggcaaatgctgtcccacaggcaaagggctgcgtgaggtacagttctgtatcagggtcatcatcatcgtcttggtccaaaaactgaacattagtatcgttcactagaaaaagcataaaataagaattagctctgaagaccacacacaggcattgaagccagagggagaccaggctactggtttagaaatactgaagtcattgagaaggaaacaaaagcatggaataagctgtagatggatctttgggtaaggggggcagtgggactcaatggactgttcctgtgtcactgtttaagtgtctgagacctggagagcaataagttcaagcaggcttgctccacggcaggccactggaggaccaatagactgtgctggccagtcctttggcatagctttaggatcatgacctaaaaacactttccagtgttttttggtaaccaagtcctttgagagatggacatatttcaatgatgagcagccatgctgggatagtcattttagccacaatgaaaagaaagcagcttattgggagtaaagagcgctggaaggggagcacagcaaaggcagatagcaaggaattcagccacaggcataacccgcagcctacccactgggattggcctgggtagttcccggggtcccaggccctaaatctaggtccacacccaataggccctgtttaatacacaggaaaccccaggtgggatggatgcctggctgtctcctgctgcttgctgacaaggacttgctctgaattttgagttgcatggggacgcccacgttctccctttcccatcctaaacagctcaatcttttatatgcttgcattcaagcagatgcagcattggatgctgtatttcatttccatctgaggattcctcaaggactcctcccgcatgtacgtgcaggctgattagttgtgtcactcagatgtctttaacttattaaaaattaaatgacaaattaatttccattcccatcttggctttggaaattatcagttttgcagagcaagtaataggggaaaagtcggtggggggatgggagaagggggcactcaaaatttctgaaataattattgtgattttaggaagagaacagatgaggtttcctttccctgattcctttctaaatgtatcaacagctaattcttttttctagagtgattgttttaatttttaagcaactttcttgataactcttcttttttaaaaaaaaaaaacttttgtttactgtatgaagcagaataaatgatactagcatgaaaggctaggcatggaattagtattttaaaatgacatcatcttgtttccccagagaaaaattctaatggggaaaatctttgctctgttcttccaaaattggtcacatttgggtccccattgtttaagcagcaattgaattgcaggctagtggtgaaagtccaaaatccaggctctgacaactgggcttcagtccagcctgtgctgccaacttccttgggcaaagcatttcatcattctataccttagtttgtttctgtaaaatgggggagttacagcagctctctcatgaggctgtcaggaggctcatacgaatgggatggtgcccagtaagcctggcccagcatctggatcatgccatgacttgataaataccagctgctgtcatgatctcccttctgacattaaatacctgtccacccattatagcatgaaaatacccagcttccctctgcctctcttggaaacactgaaggtcttgctcaggggtctttcaagaggtagcttttcctcacctcccttcacttgtccaaagggatgttgtaggccactgtttagtctttctgttttgtgaatcagaaaatgtaaactggagaccacatatggaagaatgcagttttagttacttgtaatagccaccaatggtgtgtgtggcaatgctccgaaaagcacagcatctgttacctcttatcaggaagatggggaagggttggtaccagatatggaggtgaagtgactccaagtagggggaggggactcccgattgccagtgagctagacatctggggtcataggaaaagcgctccaagagaccagccagggtccagtgaataccttgtataccgttctgaaatacccagtctcagaaggagagcaagcaatgctactcaaggcctatttcacagaacagtaattatgtgggtgctaagaggtacccacgtaatcaccccaaagcatatgtggtcaaatacaattggaatagtcaggtgaaacagctgtaacacagtcctttcttgtgagactctgaggagcctttgccatgctaacatcaattgagagtctccaagtagatgaaaagtggaatgtgctacacagctttgaaagcttgtgtggccttggtgccctctgtgtctcttaaaattcattatactggcctggcataatgcagaacacatctcagaacatgtagataaataagaagtatttgtgggggatgtgggaggtgaaatggtctgaggagggtggtatagtggctagagaaataggtttcaaggcagaagacaagggtggtgtgagcacctgaaagattctctgaacacaaggaagaaatctggtgtgggacaaaggcttcaggagagtcaatgatgctaatcaaataccagaattgttgccttaggtttggggcaccaagcttttccttttctcgtctactaatgacaaattaagatatcctagttagtcagcggcacgtgaattccaaatagaaaatgaaattcccggcagtgaggattctgaaatgctgctgtaggtttgtgagatggagatgtttggattaattttccaaccagaggcgtggaccacatgagccctgggtctcttattgccctccagttctgaggagagcaatccagaaacctagggcttttaaacaactacactaaacatgaaaaagatacccctcctatggttggaaacagaaaatagtgtgatactccctgacctgagtgaatttgtcctgataaatagctatacctacaataatgcactgctgagtggtggacaatttattccttggtttctagacatctcgcaagcaagattactgtgttgaaagcctgctcccttattttgaaatatatttttgggccaagaaaatggggtgttcatttcatttgtgagtcatgtgaaggcaggtgctcccacctctctatccacccctctgctgagcagcacttttgctgtctctatttagaagatcaatccccagttctgagacttgctgctgatgggtgcccttcatggagttattaaccaagtcacggggaagtggggaagaacctaacaaatgcagtcacgactggaggcctttatcgtccacctgagtccattgtgaatctcccagagaggattctgggctgggattgggggccagagtgcagggctgcacgtgggtggctgctaaccttatcctccgcacccttcttgaaatctgcctttagtaaaaaaagttctcctagggaccaggtgtttttatggcttcagaaccagagcttctgagaaatgccctagtaggggggaaaaaaaaaaaaggcaaataaagtcagaataaagaaaaataaacagctggagggaaagtgccatcttaggtttcttatcttaaaattttgatattctcctttgacttcctctaagagctgtgaagacatgtcattcaaactgacagtatgttggaagaggagtagaagggagaaggcgggagagcggggtgacaaaaaaaagtggggaaaaaaggctcaggccagagaaaatgaattagagcaaatatgctttggaaacaactgccaggtcagatgggtgtgatcaaaggtttactgatgctgtgtggggaaaaaatcattaagaaaggccagaacaagacagtcgattccaaccagagccacaaataaaacacattcaaagcagtgccatggggtagcctttctgttacagccggtgaaataaaaacaagctgatgatagttggaaacaccaacaacagaacaaaaggagatactgatgtgaaggaaaacagtgcttcttacccagttcagttatcattagaatgtgcgtcccactgtttttttcctgattgactgataccaaaggcaacttgcccggtttagctaattggatacagcatttaagggttggggaaagggagtggaggaaagtacagaaaaagaagagagtgagggaataacagaggaaacattctcaagtaaagggaccccggaccacaggtagtttgcatttgtcttgggggaagaggccactctacagttttgcacactcactaatggtaacagggagtgccatggccaggttagaagttagattctattgtccaaccaacatggccctcaaaaccccatcattttgggggccagaatggcatttgctgaaaatggcttttggctgagatattcaactacgatacgttaaatgtcaagttattacacattagcccagggcttctaccttgttcccaaaatgggtttggcttagatccgaggctttgtatatcagtggaggactcagattgtaggagctgtccagacagaatgctcaaaagaggttcttacagtaaaaatcaccagaaagaatccgtgaactaagcctttcctcctttcctctccattcccaattgaatgccccaatcgcaaatccatcatctcatgctcctttgaaaacagtgaccagcatgaaggaaactgtctattcatctcagaagaaagatagatcagttttcccttccggtaatctgccatatttctccccataccttcctcccagccccctcaaaacaaaccccatagcagctacaaagttgaaagggctaagaaataaaccaacctcctcatatcctgtatggtttgaaagacagaacaaaaactccccccaaagctgacattgacccctacctagttcagtgatgatggggatgttgaccccagttgtgatggatggttgacgtaacatcccgtgcactgggctgttatctggagaggatctatccattcctggaggtgtgaaccctagtgggaaggaaacagaggaggaagaaaaatcagagaagtagaaaatttggaaataatcagagtacactatatacatacaaccccaaaaatgtagcttatgcattattcacaggtcaacaattagtattcccgggataaactctgatgattaattctttagaaggacagggtaggaaaccattataaataatcgtaactcacttcatagttccctaaaaaatccagacttcataccaattatttattctgctcatagatcttggctcccatctctttccagggacacaggagaattatcccctgtgcccccttgaagttaggtatggccatgtgacacatgaaatgctctggcccatgaaaagtgagcagagcagtgcatatcactgctggttcaggtattggacagccatctctctcttcccaggccatggcaactgtgagaatacaggttactatggagatgaaggctagacaacagccctggacagttacccagacccacaaagcatactgagtgagtcaagaataaagctgtgttgctttaagccgctgagatttgtttgtttgtttgtttgttgttgttgttaccacaacataacctaacctggcctgactgttaccgtaaaccaatcaattgcttatcctcttgctggtgagtgacttaggcctcagttttcacagagttctggccaatgggaggtgtcaggaaatcttcctggggctttcaggaagtgtttccttgctcttaaaaagaaacacataggaagagattctcttttaatttactgagcacggttttatgtgcctgtagtgccaggaactgaggcaccagctgagggcataactaacttagtgatattggctcaagtgaatgacaggaagagctgtcctggagttcctggggcaagcagcctggagccatcccacctcaggatttctccctatgtgagattttatacacataaacacacacacacacacacacacacacacatacacaaatgtatttatacatatacatacacacaatataataagatgttcacatttttttctttctgtttaagctaaatggagaaggagtttacttgcatctaaatcctcctgactaatgtatatgccacctgcttatggctgatcccttgaacttcccagtgtgccaaacacagaccacataaggtatatgtggacacaggaaaattggaaagcagcctgcttggtctctgattttgcagtttgggcttctttgggtcccaggtccaagccaagtacatacctggatgaggttggaacaactgtaactttcagtttagtgagagtgagaaatatcccggctaggcagaatgtctgcctcgttaaggttttgcatggacacatatcaatattagaaacctatttacttcctacattcatctggtaaaaattaatttttctaacgaagcatacggcagctccacgcaagtggcaagacccagtgcaattacatttagatgataggcaagcattcacactcacttcggtttctccttttttccttcagcggaatgctacatgggcttaccaatgaattagggacttttaggaacaaagtcacttgctaaatttccaaggataaaactccaaatagattattatgtgaccagatatctgactcactttccagcaatgtgacaagattgtgttgagtctggcattttggctaggtgtgagtcaggaatgaaatacgggagctcaataattgcctgttgttttggaggtgcataatgcataaaatgccagagaaatataaaagggttttcttactttctgctctcccgtgtatacatttcttatcactgagtgccatactttcaaaaagaaagacaaagttttacttaatatccattccctgactgcacttaaattgattctttacattaatacactatgaaaagggtaagtcattttgattgacattgtagtgtccatcttttcaaactttcgaatatatgtttttcagccaaccacataaccaaaaacacgcatttttaaatgctagctgttttcttcttctaggatggtgaaggggaaaactaaactgttttcattagaagtttcattcaaaaacatgaaaaactggaagtgacagctgtgcagattcagtggatgtgacgtttttgaatttcttcaacttgacaagtaaacaccttaaatcggtaatgctatatgcataatacatggcctgtattttgacatccatcatcaaatgctgacttgagaaaatacgggtttgtacgtcaaggaatagcacccataaagcagggagaaatgcaggtcacacggtattaggaaaactgtatttcattacagaactcgcaacaagccacggcatccttttattttatcttatttaaagattccattttcagctgtgaaaagactcaattcctttgcatgaaaccttcatttggaaatgacatgcttgcttcataggcttctttcattttgctttcatattccattttccccttcagtcaccaggcctggttccattagcatctgcaactgacaaactatggtaggtgtccaaagacatctctctgttgaaggcccaactctcccctatgcatgactccccaaaaaagtgtgcttttattgctaagaaaacttcatgcctctttttgtttccctacttttctagtcacacatttttaaaagcaaaaggcaacaataacagcaaagttggcttcttctttttccctggtgtagagttatgttaaaggtgaacataatttattagcattgtttctttcttaggggtactgatatgggaaaattatggtcagaaacggcaggattgccccagattccttaaatggctttggagagaagagaaattcaagcaccttccataaaggaatgaggcaatccggcctttgatgccataggatggtgtccaccgcattcctcatagctgcatttgataaaggggcaggtctaaattgtggcccaatctctgaccatcttgctctccttcccattattgcttgcagccatgactatatcatgggtagcacctgaagtctctctacattaaacaacgccctagttctgcatgtgaacacactggcacatggaatatactccagagatctacagctagagaacagtgaaactgggaaacactcccttcattagttaaactaacacttgggaagttaattttagaaacaaccacttattttgccagaaaagatgactaagaatatcaccattagagacatggaatgagaagtcctcaatcaggaaaagactgaagtttaaatcatccacagccaaagctatcaccagatgggctcctgattctttagccatgtacccatagcactttgttgatcatggccatgggaggcaagttttgtgctaaaaatgacttccatatgtttgttggccatttgtatataacatcactaagtatcaggaaaatgcaaatcaaaacacaatgtgataccaccttattcctgcaagaacggccataatcaaaatatcaagaaacagtagatgttggcatggatgcggtgaacagagaacacctctacactgctggcggcaatgtaaactactacagccactatggaaaacagtgtggagattcctcaaagaactaaaagtagatctaccattttatccagcaatcccaccactggttatctacccagaggaaaagaagtcattattcgaaaaagatacttgcacacgaatgtttatagcagcacaattcacaattgcaaaaccatggaactaacccaaatgcccattaatcaatgagaggataaagaaactgtgagatatatatatatatacacacacacatatatatatcacatcacacacacacacacacacacacacacacatatatatgtgagtgaatactacacagccatacaaaggaattaattaacagcatttgcagtgacctggatgagactggagactattattctaagtgatgtaactcaggaatggaaaaccaaacatcatatgttctcactggtatgtgggagctatgctatggagatgcaaaggcataagaatgatacaacagacttcagggacttaggggttaagagtgggagggagacgagggataaaagactacaaatatggggcagtgtatactgcttgggtgaaggatgcaccaaaatctcacagatcaccactaaagaacttactcatgcaaccaaacaccacctgtaccccaataccccaataacttctggaaacaataaaaataaaataaataacttccaaagaccacctgaactccttacactgtaagttttctccccactccaatcttcagtggctggtgtggcaggtttttgttacctattttattcattcagcatgagacataagtgcttgaccaactttatcctatgacagatattctcattctatatactgtataagaactttaggtcagagactggattttcatttctttgaacttcccagattatctacaaaatgcccagcacatagaaaagaaatagaatgaaattgttaacagcatgggctgtaaagtcaggtgtcctggattcaaattctggcacctccacctataagccatggcactataagcattgtgcagactctctcctagtctgcttcttcatcgataaaccacaaatacctcccacataggacaattgtaaggataaaataaaataatgtatttaaaacatttagtacaatatctggtatgaggcaagtgctaaaaaatgctggctaccaatattaatattttattaggtatacaataagtattcgtggatcacttccccttccctatggataaagaactgaagaagtatttagtagattcttaaaaaagatttttcacacacagaaaatcctagaatactaatgagaaggcaatgagcattgtgtgtgtgtgtgtgtgtgtgtgtgtgtgtgtgtgtgtatatatatatatatatatatatatatatatacacacaatattccttatgtgatcataaggaaagaaggactatggctcagacaagatatacacaagtaatggctggaaaagggttccaggacactgtaaacccaagtgcattggaaaatgagaaaggctcaatggcattgtttttatgagactcaaagcaaaggcaagaatactctagacctaaactggttaataattgagaatgaagaagagagggggaaggctgaactagaacccaaagaaaaaaaatagccaacacttactgagtgcttactatgtactgaattttgctcacgtaataacttcggttctcagaaccatcctatgtatatactactatttttcagaggaggaaactgaagcacagagaaggtaagcaacttgccccaggacatacatctaggaattagcagatctcagagtggaacccagataaacaagtcccagtgtctcctctaagccaccacgccatattgcttcttatgtgccaggctgggctaagggttttttcatgggccaccttgtttattcctcataacagtccctgtgtgtttagggactgttgatatttgcattttgtagaagaggaaaataagattcagagcagtggcataactggctcaagcatacccaattggtaagtgtccctgggagccgcagccaggcagtctgacctcagactcctgacacctgcaggctgtgccgcatccctgacttgggtgctggccttctccttctaggtactgtccctggcaggcaagtctgaggcctgagccagtcttactttttattgttttcacttttaaacaatagcagataacaactgggacccattgtagttatgcttaacttgctttggtatggcagcatgcacaactcagtacatataataaatgctttattacagtacttttccatgggggaaacacaaagtactttctaaatcttccctagttaaatccctgagcctttccagggagagagggagatggaaattcttatcaatcatctcccctagaatagatggagaaatgaaggtaagtgcttctcccaccccgatagacttaacataaaggaattggttcaaatggtgggccaaattatcttttattgtgtgcatataaatgatggttagaaatccatatgctacgttaaactagggaaataaattaggccgagtcatctaggtttgctgagacaggtattcaatatgaagttgtaaaagggaaagatcacctttaaaaatgatctataaagacatgttaaaatcaagagaaacatctcatattacatcatctatgagatgaattaaatttcctgttaatgccagggaaaaaaacctcaaaggcaaatgtcagatgaagtgcagatcaataaaaatattttgataagtaaatgcaacaatgctatttaacacatgattggcaactgctgaaacataaattatccaaatttcccattgctgcttatgggaaaattatgcagattagaacttgattaggcttatatcatgagactcaatttggacttttaatctattaagctccaataaatgaggcatctgaatagctcccctgagcaactacggtaatagccacagcagtcatttttgcagtatgtattccaacgaatgcttcagcagctgaagtaaagaaaattccatgtatagaagcacaattgctttctaacttgtaggggaagaaaatccacacacaccaggttgatttgggaaacaggtttttggaaatgactgcaagaaaaatccagccaaaggaaaaacctcagtttaaccttgtaatattttttcacagtagttttcagtggcttcctatgaagctagaatccagagtcaggaaggccaggcagctgaccatgtttactcaataaaaaaaagattatttaccaaggcagcagcttctcctgaaactccccaaaggccaccccaacagggtagaggtagcccccaacaaggtgctggaggtcagtgtcaaggagggaagcggggaaatgcccctgccaatttgtgactcccccgcacaaagcctaatgacagtgcttggaaactgtataaacagataattctgtgactcctgagccaaaccataaggtgtcttttgcctcttcagcaatcattctatgctagaaacacgagagttttcaaaatcctctaatcaattcctccattcttcaaatgaagaaactgaggcttagaatggagaagttattatatccaaggtcacagaaccagttagcagcagaaccaggatagttgatatctgctgttttctgttcctttttaactccttctatgcataagaaacccattccacagtgtttgttgggggtgcagggaagaaactccgcccccaccctggaaacagaagtggcaacatgaagccaggcatcctgacttcacagggccgctgatggtcctgcataatcctggccacatcatcagtttagagatgagtctgtcctcctcaatctagggcctgtccgtattctccccaggacattatgtaaaagatggtaaaggttctgtggttgcaaagtcaggagtctgcaggtgtggggctactggcaagcagttagcccaccatggggtgaatgaaaacagggcaaatgaaccaagaggtggagagaatgagatagagctctgtcattgttcaagttcctgcacacaaatgtgcctaaaaccagagacattccagttatatgtctctgtttttacttaagcctttttgcattggatttcacttgtgccaaaatgtcccaactagtacaacaactgagaaaaatctccattctcttcgcggtgaaatgattcatgctggcctgattttctactgaaacaaatgactgcatcttcatttaaggtttcctgcttgtctccagtgaccagggacaagacctggcttaatactctccttgtttctttctatttacagtaactaacagtgacatttttagcggtacatttttttagagactgtctttgattagcacctttgcaagttgactccacccactgaataaagtgccccatcctttttagagtttacattttgggtccaacccaaaccaaagcaaattaaaccaaccaaacaaacaaaacttctctatagttatttgcccattaagattcgtaaaatatattcagctcttagacaagtctcacacacatgaaacaaatatatttacaggacttgtctctccaagcagacagtctctttccttagaattaacttaaagatgtagtcccagctattcgggaggctgaggcaggaaaatggcctgaacccgggaggcagagcttgcagtgagctgagattgcaccactgcactccagcctgggcaacaaagcgagactccgtctcaaaaaaaaaaaaaaaaagaaaaaaagaattcgcttaaagagcttactgtgtaagatgtttctcagaagggttggttaaggggaggaaggaagaaaaagacaaagctagtaacaactcaaacacacctaaaactacagatttggagagaaacctaatattcacccggtctaatgtctccgtttacccaagagctcatggtatcattgctttctccacaacatctcaacttctcagttttaccttatcttaattcatcttacaatttaaagataaggccagatgcagtggctcatgcctgtaatcccagtactttggaggccaatgtgagtggattgcttgagctcaggagttcaagacaagcctgagcaacatggtgaaacctcgtctctactaaaaacaaacaaacaaacaaacaaacacaaaaaaattagctgggcatggtagggtgtgcctgtattcccagctacttgggaggctgacgtgggaggattgcttgagccagggaggcagaggttgcagtgagccaagattgtgccattgtactccagcctgggtgaaaaggtgagaccctgtctcaaaaaataaaatataatgagacatacttgcttggccagtgtggatcaaattacttataattttacctccactttggcctaagcaattgtacttctaaaaatatgtgtacagccataatttccttacattaaaaatttggctgccagggtcttcattcataggtattaagtaacaacattccactgaaaacaacatgaatgtccaattttagggaaattggttaagtatgcatccactaaaaataatgcagaaaaacatttcacgacagaaaaatggtcatgataaaatgtttgtgaaaaaccacaggtaacatactgacatgtatgatccatttttttgagggtaaaagtatttatatctatggaaataagacaaatatgtcaactttcttatgtctgagcagtaaaattacagggaatgtgcattttctttttggtttctataattgctaaattttctaaaataaacacattttatttatgtaatgaaaaaaattttttaaattataaattgatgttaaagaccctgaaatctcgaaacctcatgtgatctctatgggttgagagcagctgatgaacatgatggatggacacagctggttcatctgtaagggtctgacaggtctttgaacatccacttgatttggcagttaaggagactgaagttctgagatggaagtgatcaggccaaggttacaaagcaaaggggctttaaaagaacagggcccagagagagttttcaggcttcctagttctctgttatttcagcctcccaccatcttgtaagagctactcaatctcagagcagaggccatttacataaagcacacatgggcagtgaagagcccaagaaacccacaatgccccatgcacataggggaagggaggagcagtcagagctggtttccaacacagagggaaagtggcacctgctgatgcccatccctgctcccaccagccttacccacttcagaaacgctgttccccctcttccctcccaacccagctcctgtcgtttctttacctcttccaggacgtctgccttgaataacttctcacatttagttactttatgaagatgttttcctctgcctttttttccatcccctttattcgttattttaaaatgtatgaattattactaaatatatacaaattactacatattaatgtttaaatgttgttaagcatctttaattcttctgttttatcttcatatacccactggacttcccaatttcaatatggcacagcttatgctaacctttctttattgtttttatttattcttaattcctgttctgggaccctccctctttgctgccaccacaagaggacaaaggctgttttgccactaacatgggatctcctctttcatgatggatcacatttccagtaaactagaggcttactatgccagggaaaaggcagatatatacattacaagacaatgatatcaaggggatactaataaaacacacagacatcccccctcatgctgccaagactatataccattttgtttccattacatcaatttttttctccccttttgcaagcattaatcaaagaaacgtgaagagctcattaaagtgatagattgactgaaaatgtaaccactttttcattataaacagtttctttatgttcttggtgctatgggctttgtttttcagcatttgtcatgtagttcaaatgtccttttacatttaaaataccaaatgccaaatgggccccagttgtttggtttagtatgaattgatggccagcacagcagaaaccagaactccaaaatcacgagcaaagtataacatccatatcttaagcacacagaaaattaagtagctgtaaaagatgggtttgccaagtgatccaaggccttgccatgaaattcaggaaagcagaatcgcatcaacaactttcagccagctatctctgaatggttctagagacaagacgcctggcccaagatagcaccaaggttccaaacagttgatggttctttaaaagaaagaatctttttttcttaagtgttgaagtgtttcctgtacatacgtttatgctggcagatgaataggaaactgggatcttggatcttggggtcaggcattcccacatacatacacacacgaatcttcactagatgagggtttgatgctggtttgactctgagcatctctctgtacagcgtggtcaataacttttgaccactacctgaaataagccataccatttgtggtctagaacttgaacactgtggctagactgaatgagtttgggtcctgcctctttctgtttctaatttgtgatctggggcaatttatttaaattttgtgtctcagtttcctcatctgcaaattggaagaggaagatgtcatgaagattgaatgagttaataataataatacagggaaactgcttacaacagcacctggcacagagcatgtacttcatcagtactaacttactattatttatcaacaacagggttgtaagctgacagagaaaacaaaacacatgggttttagtcccaggtcaactcctacctctctgtgagaatgtagaaggattcaatgtcttatccaaactcagttctcccatccataaaatgaggttgtagcaatgtcccaaatccctttagattaccgtgcatcatacataatattgaaaccacgataattctgtgttcagctactcaatattcaggaatgtctgtggagtcattcatggggttgttcttttaaggaagtggaacacaggagccctctcttccagaatcctatcacattgtcggtatcaacaaacatatcaacatttcatacaagagatgcgcaccaaatacattaaaccacaacaaccatgtagcttgcacatcacaactccaggtacacatcatatcctctctcaggagtagcccctaaggcatgatcctccctccaggagccctgcatcctttccatttgctaacagtcaaatcattcatttgctgctatgcgatcacagtcgtggcaatggctgtggcccttggtgtcttcatctgtaaaataggaatgactctaaggccctctcagctttgagatttatgtctctttcatgaccccaaattttaaacgtgatctccaacaaaataagctagcaaagggaatccagaggatctccttacagactccttcacaagctctagtgtacatccagatttttttgattcagttttatacctttgcccagaggataaaacttcacttctcaaaccaaggagaaggaagtactttctccaaagttgctctaatggctgagaaggccataaataaccatttattaaacaaacactatgggctaaaggaagagaaaccaccgcaattaggcccctgaggcctgcaggcacagtacataacgatgggactctcataatccaggcaatatataaccagttgttccattttcttgaagttatcttcataatcaagatgctatctcgggcattgtgggctttaaaactatttttaattttaatttaaagagtaattaaagaaagacaatggatatgcaggataataaagtaagcgattagcagcatgcaaatgacataggcttaatgataatatggttctagtctccaaacagcttgtcgagagaaagccctttctacatgtggttgttcagctaatgtgtctcaacccacaattacaacattgctgacaccattaaccagtgaaacaacaccacttcgcgaaatccttgttgtctcattaaaaaggaaagggtcaggtaatttaccaacgttgtatgtctagttttgttgttggtaattagcaaacattacccagcatagactcccactgggaactggaggaactttgtgaaatattaaagaagaaagcctttatatttcactggaaaattgaaaagaggtgcagtaatattctccctgtcatctttttgcatttaggaaaaggaaaatgcaacttggaactctttaatttcaggagaaatattcaaaatgcattgggaagtcactacccacattaagaccctggatcaccattgtatactggcaaatagaatctgcatccctgtttacaaaagggagttggagatgggaggacgggaaaattgcaaactttatctttattgctcttacttatgttatttgaattaatctccttgaaacagaagaaaggagatataaaattttctttttgaaatgctacgggacttaaataagcaccagaattatttattcagaaaaatacacacacacacacacacacacgaacacgcgcgcgcacacacacacacacacacacgcacatacacacacatatttagacctaaagagagaagaaatatattccagggaagagacttcctgcctccatgcttcctaatagaatcttccccacattggaactcagaccccgcccccaacactggccaatgcttggtgtgttgtcagggagtagaatggtatcttattctttaaatggaacttttggaacataaaacacattccaataaatgtgagcagaaaattatgaattcattaaactactttggtatcttgtgctatatataatatttatattccgactactgtaaaatatgctttaatatctttaggcaactataaggacttaaatatttataaaatggctaaagataaagtatggccctcttattcctacatacagatgatgtaaggcatgcaatcaaagacaataacactctctgcccatttgtcatcttaaaggagccgatcaacgcgccatccctcgtgtgccatctacataagagttgttgccgacacaggcaactccagaggagtttgcgccttaaaaactacctagagtgctatacttcatagaaaacagggctttctgaaaatggagacaaaacaataaatttgcaggcaaaacagctccaagaggggcttcaaagtactgctgtatttatctctgggacatgagggaacaggaagcattttgatttaatatttcataagatagagacaattgcttccttgcatggtatatacttaatgctcacagaaatgagttttttttaaaaaagtttcaatatcttaaatgcaaataaataaataaataaggagacacacctgcataataggaagggcttcctttggaaatatggaatagacccatataatcccaataaagagaaagccaccacgaatttataatcacctaggggcctgttaaaagtagttttatagattaagtgtgaaacctcaaccctgatgttattattatttaccttccttgcttgcctttaggcccatggcctgattgattttcaaaattcttccatttcctatgctgattaggtattcaaagaattgtttgtgcccacctgccttgacctctcaaatggacaccccctggtttattttcccagctcccactagctccctgctgggaaccatgtggaagtttgtgaatttctcatgtatcttgcattttcacaatgcccattatatgctttccaaatctcctagcaatcatgcctaggagaatgatttattctataaataaatttccaagataaatttctatggaaatgtaagctttagtaaatcagctgcctgatacaaggatcagagatggtttccttgagtaagtaaggggctaggctggtgtttctcaacttgggctgcacgttggaatcaccaatgcatgcctgcatcaatgtctaatttaattgctctggagtatggcctgagcatttcaagaatgttaaaagttccccaggtgagtgcaatgtgcagctaaggttgaaaaacagtgggctagttcagaattaaatccacccatttaagggcaactaatctttgacaaggatgtcaagaacacacaataggtaaaggacagtctattcaatgaataatgatgttcagaaaacaatatttacatgcaaaagaataaatctgaacacttctcttacagcatatacaaaaatcaaatggattaaagacttgaatgtaaaatctgaaaccgtaaaactcctaggagaaaaaataggggaaaagctctttgacattggtctgggcgatgatttcttggatatgacaccaaaagcacaggcaacaaaagcaaaaattaaaaagcgggactacatcaaactaaaaatctgcacagcaaagaaaacaatcaacaaagtgagaagccaatctactgaacgggagaaaatattttaaaaccacctagccaataaagggttaatatcccatctatataaagaactcatatactcagtagcaagaaaataaataacctgattaagaaatgggcaaaggaacctaatagacatctttataaagaagatatacaaatggccaacaagtagatatgaaaaggtgctcaatatcactaatcatcagaaaaatgcaaatcacaataagatatcacctcatacctgttaagattgctattattgaaaagacaagtgataacaagtgttggtgaggttggagagaaaagtgaacccttgtacactgctggtgggaatgtaaattggtacagccctatagaagacagtatgaagtttctataaaaaattaaaaatagaaccaccacatgatttagcaatcccacttctgggtatatatccaacagaaatgaaatcagtatctcaaagagacatctgcacctccatgtttattggagcactattcacaatagccaagatatagaaaccactggtgtccattgacagatgagtagataaagaaaatatggtctgtgttgtgtatgtacctgcacatatatataatggaatattattcagccataaaaaagaaagaaattctgtcattcaacaacatagatgaactggagaacatcatgctaagtgaaataagccagttatagaaggacaaatactgtatgatctcacttatacatggaatctaaaaagttgaactcatagaagcagaaagtagaacagtggtggccagggactgtggtgagggtcagggggaatggggagatgttggtcaaaggatacaaacttgccattataggatgaataaattctggggctgtaatgtaaagtgtggtgactatagttgatagtgctgtgtagtacacttgaagtttgcaaaaagaatagatcttaagtgtcctcatgacacacacccgggcacacacacacacaatagtaactatgggagatgatggatgtgtttattaacttgattttggtaataatttcacaatgtatatgtatatcaaatcatcatgttgtaaaccttgaatatatacaacttttacttgtcagttgtatttcaataaacctggaggggaagaaaatcattagggtagacaaaactcttaaatttgtatataaatatttatgtgtctatgaagaggtaggaggagggtcacagagaagattcattattagctatttaaaggggtaggtacaagacccctttcccagttgagaactaatatgctataggttttctggctgagacccaaaattactgttttaagaaaaaaaaaaaaaagaggcaaaggagggaggccaagtgccatctgttgactaggtggagtagcatgggtcctgctctggaagggtgtcacttcaccaacatcagggctcctaccacaaccaaaccccagaggttggaagtgtatgaggttttctgtcagcgagctgtcccaatctctgcttcagagagcagctgcgttgcatggcgccatgctagcctgtctatggaggggaagcgccccatgctcactgttcatctgccctagtccttcctcaactcctctgtaggcttttgttagtctaccttacctggtctgctcaccttccaaaggtgtgttggtttctatcatcatctattttctatgcatatttacagacaaacagatcaacagtaattctggctgctaggtacaagtggataatcctaacttatgatttgttaatctgggagtaggaggggatgaaataaaatagtaaaattgtaataataataacaaaaatagctaacattgcttgatttctcccatcctaggtaggaagtgctttaacagccattcattcagggttgccatgtatggttgtgaaggttgggcactacacagtagctaatctaagtgggtaccactcatatcaataggcattgtatatttgcatatttatgacaatattttttcccagcagatgacagaaaagtgtattgttcaaacatattagtagattatcaccatttttttcagcagatgaaaataaggtgtcttgagaaaagagtgactttttctggcttacttaaaggtactgtatggacaatagaaagtcctgtatctcattgaattctcatagtcatttgataagccaggtgcatttagtattcttagtgagaaaattgagataaaaagaggtaaagtaattttcccaggcctagtaagtggcagatctgggcttcaaacccaagctgtcattccagacccatgtgtgccatgactgaacttgactgcaaagtgctatttctacagcctttgatgtttaataacctttctgcagccattatgtctttgtattcatacactgatccctcggtgttttggggtggggtcatttaatatatagatatatagatgaggaaatgaaatctggaatctttattatgtcaaattgctcatgatggacagaaccaggatttaaaagctgttccttaaccctccatgactgcatcattactctgacagccatgtttgtgattcactatcatgaactagagcaacaaaacacatcttccaagttcctcctgctccagtctaccgctgagaggaatgttcatttctacatggccagggaagctctcaggaagcattcacagctccctggagcagaaagcagagatattttctgccctttgttgaactttggaggtctcagtcctacagccttgggccctgggttggtactgtgtaatagtacattcagcgaggccagtcaaaggttgagggccaggagctattagtaaaggttaagggaatagtacagtttatattagagacaacctggccatctgataaaggctcctccagacaagtgcaacatctttgatctctgtaacccttgtccagtgcccagttgtcaaatgaagggagactaaatcctggagggaaagtgtaggtttttaatacaggtatttggctgctttatctcatttgagggcacgttaagagagaacaggctgcaaacaacagatagcaggattaaatcatgtattcatgtatccatcccctccacaaacctctactgagtgtctactaggtgtgaggtactgtgctaagcatttagaaagatttctggcagttggcgagcatgaagaggtcagcaaaacaatagaacaggctcttctttggaggatctactcaggttaacagtgcacccacctacaagcatttcctttgacatagtgagccctttaagtaccttggttataccattagtacacaaatagccaggtgaccctctgtgaaaaacactcggcctttcctgtttctgtgccttctgttactcagcttcagccctttccacatgcctgtcggaacctttatttatattaatcacacttattttcaaattctggtccctttactctggagtctttcctgactaccacagcccaaagccacctctgccttctcataacacattgtgtggcagcatgcatgggacactgaaaacatctggtagaacatctctcctggagatctgtaacaagatgctcaaggactatcctgcttttctggaattcagaaaataattttcctccagaccattccatgaagtataattgaagcatttaaggactagccatatccttaaatgttcaataaatccagaactaaagtcatttataaatcagttggcttctttgcagtgccactttttctttctttctttctttctttttctttttgcttgtttgtttttggttttgtttttgagatgggatctcactctgttacccaggctggagggcaatggcgcaatctcggctcactgcaacctccacctcctgggttcatgtgattctcctgcctcagcttctggagtagctgggtctacagatgtgagccaccacaccaggcttatttttgtactttaatagagatggggtttcaccatgttagccaggctggtctcaaactcccaacctcaggtgatccacctgcttcggccccccagtgtgctgggattacaggcatgagccactgcatctggcctcagggccatttatttctttatttttttcttgagatggaatttcgctcttgttgcttttaagaaaagaagtaaagtttttaagactgcacatgagctattgcctatagagaataggtgaagacaaaaatgcactgaatagctggctagatttatctgccagcttgaggcatgtgtgctatcttcacagcaggtgtattgaatgaaatggctcacactctgcacaaggaatacactgaaatgttccaagccctgtatccttaagtatgtgtgtcaaagtcattccatacaacttattttatgtttctgtcccttttgcctgtagaccccattacttctatgacagcatagactatggagacaacaggggcactaacctcatgcataggatgcaaaccaaactgacatgcaggataaggtagttgacctatccttatccagaatttcatgaggtgtcttagagggtccatgggattacaagacttcctttacttctctctgattctacagctgtggtttccccactataagacaatttctctggaccattttctgagcctaggctttgggcgctacagtggtctcttcattctcatctgctgtcacggaaacttccgcttgagcatggaaggagtaaataaaacctgaaaatgttatttaagtgtcttcacaaagaaagtaacagctaggtctcaaatattccactctcttccttacagctccgaagtcccatctatattcacaagaaaaacagaaaagaaagactccaacagtcatactgttcacagagacaggctaagcacagtgcttcacattgcccccagatttactcatttgtccagtggtagtagcaagaaagactgaagccaacagaatcctagtatctctcattgttggaacagctagggtcaaggggctcaaaaaatggggattcacagagacaagaaccgttgaaaacaaacttcagccccttaggtgcaaggaccagtttagaagtgaggctggcacaccttgagcactttcatccccttgagtgtttgtcctgggggtgcccccatgacccttgaaagtacatgtatagcttcaggcccattctcatcaggataacacttgccttttaagagacaggctgatgtgccgagaaaagcatagactttgaaatcagatgtttggagatcaactccatgtgcccttgactagctataaggctatgggaaaggtacctaattcccctgaatctctgctttctcaactgtaaaatgaaggtggtaactctccctcagcaggttgtcagggagattaaataagatattacataggaatgtgtctggtgtatggctcacctgaaaaaaaaattacattttcttaaaaaaggcattaaccaggcacacaaattttgaggagtaaactggcatgtgagagccagatgctaaaaccataagttcagtccaaccccaagaccacccaaaatctgctttctgtctctgaagctaagatttcccttcacgacagttgtcacaagccgggcacagcctgagtggggacatgaatctgctctgcatccatttggaaggaaaagatgattctgtctgtttttactttttcttctgcacatccactctccaagaaagtctttcatgcatggagggcataaaaccctccatgagttcaaaaagtagtccaagtttctcagtctcttattatagctgctgctgttgtttttccttgtttctcttgctaggaatacattactagaatagtaaatggcagggttaaagaggatctctcatgtgatgaaatatgctatataggaaaaattctcttaagttgaagtcatttagaaaacagctgcaattgctgctttgctgaaatacatctgcacctgagattcttgtgatgagattcatcttgggatgtccacggaagaaatgtaacagggcaggcccctttctgtacttgagatctgctcagagccctaagccagattttctttattgtttagtaagctcttttaatgaaatgtactactcttattatagaggactcaagataagatctaaatcacaaaccaataaaagaaaattattggggtagatatctaaagttactacctagaggctactccagtgtggtatttataaatctctaaacagttaagtataattgtctttctggtttttgggacggaagccaacagcagtttcagttacaatggaagaaaaatattttagcgctgagctttgttcgtttagtgggtataaagagaaatggcttctcccctatcaccatttcagaattgagagagaatattgtggtaatgaaatgttatatgggagcagctgaaaaaattcttctctgacttcaaggaggggaaatgtgtgtgaggatacatgtataggtgcgtctgcaagaaacagtgagcagcctgggggtcaggaaagccaggcttgtagaagtgggagaaggcagagccctgggaaaaaggcaggtgtggaagggtggtgtggaagttgaagatggggtggtctgtccaattaatggaaaagccagatctgcagctgctcaccccaatgccgtccgctccccatctttgaacacaaagacagtgccgttcaggaaggacatgaatgcttccactaaaagactcatgaccccaatcctgacaaacaccatagctctccctctggagttacaatgcaaatcatataaaacacagatccctatgtaataaaaatcaagaacatgctggatatccttagttataaaggaccacagaactcatctctctaccaatctccctcccatcacaaagagcgtgtcagtaactctcctttagcaaagagacagtcagggataggaggctcgctgcatttgcaggctgtccatgctgttctggaaatatcttccttatgttgggctaaaatcctgttctccttaattattaaccattggccctggtttttgtccaatggagcagaagattaaatggccctttaagcctgctggctttgttctcttaaccacttggcaagtgacatgttgtccaggcactgccccattctggccgtcctctttacaacatttttctgtttgtttgtcaaatttctgcttcaaatcttcacagctcttgacacattccctcctatcccaacaaagatgaaacagtcactgctcaaaagaaatgatgcttttatcaccaaggtttatctagcctgtctttactgatcatttgaaaattaacatgcagaggtcctcaatgcattctgtcctgtggatttcatcccagagttccactttaggaaggcccttttcgttctgctttttgtcatccagtaatttagagatcctaatccacactgtctcacacaaagataaaagagaaatcacattttcttctttggaacagtaaaagacatctcagactttaggatagggaaggtgtaccctatgcccccaattaatgctatctctccaaggactgctgccatacttccaaagaaaaatgtcattccctacttgaggctcttaacctttgttgaaatgtggagaaaggagggtgtccgcttatatgtggatgttcatttagtgtaactatagcttcaggtcaaagagggcgggaggaaagctgtgtgtgtgtgtgcgtatgtgtgtgtgtgtttgtgtgtgtgtgtgtgtctgtgtgtctataaagcataaaatatggaaaaaaggcagtggacatatgtcttgggtttgagatcttggctcctccctcccctgggacattcgggacaggctcagcttttggttctccggcttctaccaaagttttcctctaccctctctttctgagatggtatacttctgtcctgcaattctcttgcctctctccctctctctgaggctctcctttgctcctagagcatgagcaatgggccagattgctagaagcaaacttttcctggattaaggacttcatttccacccttcagcttttcatgcccatctggattttccactaagtccccgtggaaataaaccatgactaaaacccaatcctcccaacactgctttctcctgcagcctgtccctccactctgccatcctctgacccccagaaggaaacacacatccatgcagactgttttgcatgtacagtgactccttctagaacctcccattctttttccagtccaaggtttcaggcttccatctggatagccacagttcctaaccagagtccttgcatcttcttcctttccactccaaacaatgcttcacagggctgccagatccatctccctaaagctcaggtccaatcccatcactctcttgctttgaaaccttctgtagctccccagtgcctagtgaattatttacagcttcctaactcataaacacataaaaaattatttacagcttcctaactcaagaaagaaaagaaattcctcaatgcccaacccacatttcaacttcatctctccctgctgccttatatgtaccctgtattggggccaaattgtacttgtccctgtccctctaacacatccccaggaatctttgccgtcacttccattcgctccgtctcaagccagctcactttgcctccacctgttatctttttcaagcatggaattaattactcttttcctataaatctttgatgactcccccaaatccaaacccttagcaagacaagtctacactctaggactgcaccatccaatatggtagccactggctatggatcactttaaatttttatatttgttaaaattaaattaaaaggaaaaatttaattcctaaatttcaagtgctccatagccacatgcattcaagtcatccacagatgccacctcttcttttttttttttttttttttttttttttgagatggagtcttgctctgtcgcccaggctggagtgcagtggcatgattttggctcaatgcaagctccgcctcctgggttcaaatgattctcctgccttagcctcccaagtagctgggactacaggggcgtgccaccaggccttgctaattttttgtatttttagtacagacggggtttcactgtgttagccaggatggtctcgatctcctgaccttgtgatccacctgccttggcctcccagagtgctgggattacaggcgtaagccaccgtgcctggccgatgccacctcttcttgaaagccttctcaattcctcaaaatacctaaaccaaggatccctttgtgttcctctatttctagcctcgtccttgtttccttggactgtcattgtttatggggatacctcctccactcacctgaatcctgcaagcatagtgagtggctgaatccaagcaacctttggtcacctttgtgttctgggcctttagagtgcctgatgcatggagaacagccatttattcctttttcttttccttaggagttacctttcatggaagggtaagcaggaagcaactacaagatcatcatttcaaaacaatatgaaagcagaatgggaaatgccatggcatgctccctcttttcaggtatgaactgaagcagctcagagagcggacattgcctccctctgctcaccctttcttccaagatcagactcagttctcatctttttgaaccacagggaaacagtctggcaagagccactgttgtaccagctgatttaaattgaaatgttttccccagataaatgcgtgctaaataatacaccagctctccagccaaagggaagtgacaggcactctgtaaataaaggcacttagttgctggtaaagagctgtaaagtggttctgagctgatgtttgctgaccagcaagaagcagcttcatctgctttatataattgtcactgcagttttgcctgctgtatattaaaactgcatctcatagacccaactgtcacatcggatataccatctggcttgggatatgccaccttttctgtaattgtttttgacaacaagccatcacatcttgggtcttttcagaaagtgtctggtccagaatccctaggctgggtcagttctgacaccatgtgggctagaaaagtgacatcaaaagggagtgtgaaaagagaacagaagagaaaaaagaggctttgttagtctaggagccctaataacatgcagtggcagctgtccaatgaaggctctactttctcaatgtgaatgcacatttttcatgctaaattatatcatcttaggacagctttccatagggttgcatgcatattctggcccaagagcatgacatttgtcctgagtccacatttctacccagtgaggttctagagacatggagacagttcttcagacaatgcagagcatgaggttccataaaggaccatagaatacataagagggaaagcaaggtgtcagtggccagaaatctgtgtagttatcactcagaggaagttagatttgttttccaaaatgataagagtaacatgaaatccccagcactttgggaggccaaggtgagtggatcacctgaggccaggagtttgagaccagcctggccaacatagtgaaactctgtctctactaaaaatacaaaaattagccgggtgtggcagcacgcacctgtaatcccagctacttgggaggctgaggcaggagaatcacttgaacccaggaggtggaggttgcagtgagctgatatcacaccattgcattccagcctgggcaacagagagagactctacctcgaaagaaagaaagaaagaaagagagaaagagagaaagaaaggaaggaaggaaggaaggaagaaagaaagaaagaaagaaagaaagaaagaaagagaaagaaagaaagaaaaagaaagaaagaaagagaaagaaagaaagaagggagggagggagggagggaagggaagggaagggaagggaagggaagggaagggagggaagggaaggaaggaaggaaggaagggagggagggagggaaggagggaaagaaaagaaaagaaaaaaaatggagagtaacatgaaatcctttttgttccccataatccctattcccttggagcttgatcatgccaaatgcccagatgaaggatgacaaaagtatctcaggccagtgggcactccagttagtcaaaagggtctcagatatagaaaagcagggaaactcagctcacagagtcagctcacaggctgggaggagcccaaggagtggagtgctgggtctgcagccagaggtgagctctggggaaggagcgatttctctgtgttgatggctcccactggaccactgcctttacaaggttagagtatcaccagagaacagtattcaaaaacaagagaggagcagacagacagacaagaaaacaatgggacataaagtcttggtgggcctagagctttgacactctctcttagggagcagaacagactgctggctagtgagagacagatgctcctctccactgctgaccaggggtctacgagaatcactgctgagcatagaaacacatcctttgccttcttctgtcatttgtgcggtcttagtccatttgggctcctgtaacaaacaccataatctgggtggctgatagacaacagatatttatttcccacagttctggagaacggaaagttcaaggtcaaggcgctggcatgttcagtctctggtgaggactttctcgcagtgtcctcacatgacagaagggacgaggggtctctctcaggcttcttttactttatttatttgtttgttggtttattttattttgttttagacagagtcttgctctgtcacccaggctggaatgcaatggtgccatctcggctcactgtaacctccacctcccgggttcaagtgattctcctgcctcagcctcccgagtagctgggattataggcacccgccaccatgcctggctaacttttttgtatttttagtagagattgggtttcgccatgttggccaagtggtctcaaactcctgacctcaggtgatccacccgccttagcctcccaaggcgtgagccaccatgcctggcctcaggcttcttttataaggacaccagtcccattcatgagggctccaccctcatgacctaaacacctctcaaaggccccaccacctaataccatcgccttgagggttaggatttcaatgtatgtatttggcagggagtaggtggagggtacaaaaacattcagaccataactgtgtgcatgtgtgtatacaaaagaaagagtgccctttttttctttggaggaaaaataagctccctttctctttcctccatatctcctgtcaaaacctatttttcttgcttatcctgtgctataaaagaataaagaaggcttttgggcaccggggagtggaagaattgttaccagtttggcctttatataggatctaagaggctgggatgaggtttaagagaactggaaggaacaactatatcagatgtgtatgtaactaaattatacactgacattctaatctgtggccctggaaaatcatgatcgagtttggaggaaacaggcatgttggggaaagggagtgttttcctgcctcctcctgctggcttctgtctgtacttaaagggagaatcattgctttcactgttttcctttccccttgatggttcactcctccccaggagaggaggagcatctaccaagggttggtcacatcctgttcatgtgaaggtttactgtgctttaaaagggcacatttgagttgcctggggatcttgttggaatgcagattctgacccagcaggtctgggatggcccatgaggttctgtaactctaacagcctcccccaacagacacccatactggggcagggcagagaggacacatattgaaagtcaagggcttaaaggcaggaaccaaatgccggcttgcctctttcaactcctagaaggtcagcttactgtcttctcacatcctttctcgcctgtgctacccgggcaggccgcacaggatgcgggctctacctcttcaggatgcagctgggagtaagctcagagcctctcctaggccttcacatgttgtgctgtcctgcgggcacagctgagcaggtggataccaagatttagatttgggtgtggcagggaggacggtggcatggagaggtcaaaattaggcttcaggctgtatcagggtgatgtcagaaggacagaagccatttcacatgcaccaccaaaggggaaggttctcttaagcttgaccagaagctgctgtgaatctcaagatcctcagagaagccccagcccctctctcagtctgtagcagtgaagacactggctcccagaaagctcatctgatagaagatttgaacctgggtctgccagggtctggctgcagttgcctccaaagaatcaaagcctatctttctcctccactttccaaatctcaccccagtgcccatctcccaccagctgactctagcccagagccatgcagggaagaggattccaggaactattgttcctggcttttctgcaatgctaagcaaatgttagaaggcagtggtggtgatgtcaagttgacaaaaaataatgtagctcacaggtccaggatgcatgattcagctgagcttctagaaagcctggcatgatggggaggaggtcagacacttgccaagctatcaataaggtgatgcttcatatcccagtagccatagctctcatgggctgtgctcctacacccttccatcctggactgatgggattctggtccccatcaggcagccaatgccaccctctggcagctcgtctgtaacaactatcctccaattcatggctagcctacacggaggtgtcactcaatggaaaatgctttgcatcctatcctgccagatcctgattacagaggtcattttttatgaaggttttgctgtgttgcctttctgagacccctagacatctttacttgtaaccacctgcccagggtcccaaagcaaatgacaggaaagactaggggcagagtaggaaggcagacgtgtgtcacttaaggctgctttgcctcctataggaaaatgtgtggtctgacaagtgtcaccatttgctaaatgacttttagtgtccatagagttgccactctccagagattaccatcccttggtcagcagagtcctagaggcggctctaacaatagcaaagcttcattcccatcccagctcaatggcaaaaacatatactggaaggaaacggtcagaattgtgcagccagcttcttttcagtgctctgacatttagctgatgacactggtcatgaagccactccttgggaaagctgagggggtggctatttaaaggcttgtttatcctctggaaaggcaacctagtctgtgtgtgggtgaccaggtctcaagcctgcattctggaatggaaagaagaggcagcagatgcccctttgaaagccatcatggtgaccgcaggtttcactgccaggcaggctgatgtgagcctctttgaattactgagtgaaggatatccctcttgccagcccctgtcccctgcaggcacagcaaagaagtattacaggctgtccttaccttgggaattagcctgcaagactccgatgctgtcatcaaactgcatagatttgatgttgagtgacgccaagatgcattccttgtcctgcagcgaagtatcatcaatattattctgattggctgacaggataacgcacatgtcacagaggttgatgttgacagcccttaaatcagcccgacttaatggcgtaccctttggcatagaggaaagaaaaaaaaacagagatggggggagaaagagacagagagagagagagaggagcaaaagtgagaggagagggaaagaggaaaacaaattaaagattgagtcggagctttgggaaattatttaacaagtatcttttttatgccttgacattaagctggcctaactacattcaagggaataggagctgtgtgctaatctaaagggtagtcggtgctgatggcagcattttaagcttgttctcaatactcaatcaagctattactaacaaacgcgggagaggaataatgccagggttctacatcttcttcctgcctggaaattgtcttgatttaagtaactgtcctgtggcaacctctggctttcagaatgtaacaagggggtgggtttcaaatgcctgtttatttaatagcgggtcacttctgtctcaggcaaaagacagcagttccaatgcagccaaggagaaatggccagtgagcacagagtgatgaggtgggcctggatgtgcggctcaatttggaggctatggatggagtggaattaatgtgtgcaatgcaaaagagatatggaaaggagttaagcttcagatcatataattttattgcatattttcagcaagaaaaaaatacacagggaaatgacctaattgtccaacaacataggaatggagaaatatacttttggacatgcacacagtgaaaatgtatgcaggaggtaaagaggcagagctggctctccatgcaggcattggtttagaagcctaagatagagggggaagtgaaaaaaaaagttctacagcagttaaaaaaaagtatagtttcatttatgtaaaaaaaaaaacccacaaaataaaattacatatatataaatgtatgtaaatttggaaggaaagcacaggaaaaatagccattacactaataatggtaattccctctgggaagggaaataggattcgtgggggtgaggggaaagtttgcttttcactttatatacttctatattgcttgaatattttataacaagaacatatttgtatattacaggtacatttaaaaaataaataagccagtaaacagattttttaacataaaaaataacaacaaaagacagtggaaaaatcccagatccaggaagtaacaacagagtccgggaatgcaagcatagggaaaatagaagggttaggttaggacagggccatggcctccacatgctctgtgtcttcaggtgaagccacagcaaaatcatcaggccaccccatgccatagctccccagtggccacgcggcatcattttggggctcctgtctggccaccagcttcattggtcctctagcttgaatctagcttcctctttgcctgtgtggtgacctgagttaccttcaactcactgattgtgtagaccaagggtttgccaactgtcacatatctgggaatgtcctcctctaatctccctttctggagaactggctttggaaagagacttggctgcagagatggagcctatctaccctcttttatgagtcactggtagtcatgattctattctcaggccctaaaatattgtgcaactatggaggaaggggcatttagcactgtggttgctgctgagacacaactagttccaagctctggagcagcgtctttttgagagaaggagaatgccctcttctcctgtgatctcttggtacaaaacaagtccaaccaacttcctgaatcattttgccagtgcataagcttcaattgcctgcatccatattcttttaattttcatcttgtagggaagccagccgtaattgtgatataagatgatccctgtgcagttgtacacacgtgatttcaaactacaagaaatacaaatgacatacatagaaatcgcttatgtttctctgggctggccctataggcagggtactgtttaaccaataaactctgtgaagacataggtgaaggcccattttgtgaaaatctattgtgcttgagtatgttaaattttggagggtttgaaatgacctgcaaagatgacagctcattcatatacatgaagaaagatgagtgaacgtgtacaagggcacacagagccgggcgcggtggctgatgcctgtaatcccagcactttgggaggccgaggtgggtggatcacctgaggtcaggagtttgcaaccatcctggccaacatggtgaaaccctgtctctactgaaaatacaaaaaaagtagccaggcatggtggtgcatgcctgtaaacccagctactcaggagactgaggcaggagaatcgcttgaacccaggaggtgaaggttgcagtgagccgagatcgtgccattgcactccagcctgggcagcaagagtgaaacttggactcaaaacaaacaaacaaacaaaaacaaacaaacaaaaaaggtcacacaggaggaaacatacacaaacacacaaaacacacacacaaataccaaatatcacacatatacccatctctctccacacacatacacacacagactcatgtatcctggtaaaataataaaccctttacaaagacactttcagaggtcaggggactatgtggaggagcacatgacagaaagataaccatggaatcatataatcaaatcgaccatatttctggaatgagcaaagcatatatatgcttatgctctcctctgtgtatgactgtttgtctataggtgactattttcaactgcctgtgctcactaaggcagtgggtttttggcccagcatccaaaagataactgtccgatctttttctcactcctttaaatatttattgagtccctattgtgtcaggcattatgtaaaggcacatggtggcatctaatgagtaacatgtactgcttgtggatagattcttgtgtgttctttaatgaattatattacttggctctttttccccccatttctgaggttttggaagctgataacagaaataatacattttagctttgtaagtgggggaaaacccagacttcttaacatgtagagaaatccatgttcctcagttgtttcttgttttgtttttgtttttgtttgaggcaggctcttgttctgttgcccaggctggagtgcagtggtgctttcacagcccactgcagcctccacctctcaggctcaagtgatcctcccaactcagcctctcaagtagctggaactacaagcacacgccaccacatcaggctaatttttttaactttttgtagagaagaggtctcaccatgttgcccaggctgctcatgaactcctgagcttaagtggtcctcccgcctcagcatcccaaaatgcagggattacagggattagccactgcacctggcccctgtttctcagtttcagggatgtgaacttacaagaaaaatatttggaggataagtgagatttgcatgaatttgtgatgtggagaattacatcaaatgttgaaatgcataattctctacaatgttttgagagtttgtggactatgcattcattatgattaggaagtagttaattacatgactcctaaatcccatatcctcacactaaattgtggagtcccagactgttttttcagactgaagtcctaatgttttgcagtcaagaatatcatgcacacatgcacacacggacacacacacaaacacaaccatgaacacgttgctggacttctaaatgaacaggggttggggctgagctgcagaaggagttggccttctgtacagcagaaataaagaactctgttatttgcatttatttagttaaaaacagaaggtggcacagatcaatgtttcttcaagcattaaaaatgccataagtataatgctataaatagttctgtaagcaaatccttactataaacatcataatataacaatgctctaggttttgtataggcaggagtgagagtgtttagacgctgatatggttaatatacttgatacaagctaaacttcatccctgatgagggactgaacttggctgcaaattccttttaataaggtctcccagggtttggattttccttgacagagcataggggaagtgctgagtcctcaggcccatacccagatgaagaagcacaggcatgatcaaagctacaactattatatccatccgggattttcttttgtgaatgaaaagaagaaaaggcatcaataatgtgaccttggacttacaggcaatatggacactttggggaagttatgaagcgtctcccattcccgcttgaggtactcaatagagcccacaaacacaatgtgcttgagctcatggtaatgaaagttgctggcacggagcggcatcaccaggttccggaggccgatcagggctgagctgacgtcgccaaagatgcagaccacgacatggccactcaggacggtcatggcagcttcacttcgagtctacaacagggagaagtgggtaagagtcagagagaagactgcatagggctgttgtaaggagtgaaataaatcatttgtgcaaagaatcaagcaaatatttgctgagagcttactatgtgctattatttttatttcatcaatgttatatacatgccatatagagctataatttgagcacgtgtatatgtattatatttttgtaataaatctgtccaaatgtatagccatacacattgctaccttctttgacaaaagatttaagaaaggtatgccataaatatgtgtgagcagaccttcataataattttcaggaggtaaaataaaaaggaaaaggaatatttatgctatttggaaagagaagtcttagtttccatgaaattgttgattaaatgagctgccttttctggcttgcttgctgagatgatgataaaatggtcagatgcctgcactgggctcagtgggagaaatttgactttagaattctagacttatcagtgagatgtccgtgcatcagcaggtggaacatgctacctaaagccaggagtggaaaactacgacccacaggccaaatctggcccactacattcttttgtatgttcagtgagctaaaaattgtttttgtgcttcaaaatggttgaaaaaaaatcaaaagaagacaatgtcataatctgtgaaaattacataaagttcaaattcccataaagttgtattggaatgcagccatgctcatacgtttaggtattgcctatgggtgcttttatgctacaacagcagagctaatcagtagcaacagagatcttataccctgaaaaacctaaatttttcattatatgacttattacagaaaaagtttgctgacccctgtccaatgctgccttggactttccagggacatttctggaggggcctgttttgcttaaatcattcagagaaaagatctccccaaataatcattacaaggggctagagagagattagtaagagcaacaggccagtgtcttcctccaactccaaacctctatctacaaaggagacaaatgaaagaacacagtcactctattagaggagaaccccaacttcccaggaaatacaaatgtttagtcactgctggccctttgattcactgagctagtgaagccaggaggccagccgtggacctttctctgcctctccttctggttcaatgcctcccattcctgtccacccactgcatgcctggatggccccatgtggcttacaatgctttgggggaggcatattaatgtccactgtacatatcaaactctgcttgatttaatctctagaattgaccactgcattgattgtataaatgccaatgttgcaattcacaacaatgtcagggttattacagtaacccccaaggagaggaagaaactagctttcactctctgatcattagaataaagcaggggctgtcaccattattggtttccctctgcaatagtccagggaaaccggagacataagctgtaagaaatgccttagaaactgtgaccaaggaagacccactggggagctcacatcacatatccccacttcctgcagaagacctggagttagttatctgggccgcacggaagtgcaagtgcctgggtgccaccaggagacagccaaccagtctataaagcactgttatgtgatggggctcctaattatttgtaattggccaggtcacctgggaggctagctcccttcaacaagccagaggaatataaactgggcccagggtggaagtgaattctagaatagggaggtggggaaggcacagttagttgagtggccgaggcacagatgctgaccccaggaacttcgatctgggatcaaaacacccatcctcagactggccacagctacatcacccagagaaccttatgaatatcctaattctagagcctcagccccggtgtgtctgattttgccgggtttaaagcacactagagagagaaactgatcatttctctatgtatctggaattcccatgcatccttccaggcccaacccaagcacaacctatgtgtgtatgacgggacttgcctggtcacttaaacacaccctagtccttctcccctacatttcaatagcattttgcacctcttaccacttagctttaaatacactgtttcatgggttacattttatatcttctctctaattaatccaggaaattacaattgggactatctcttatatcttcaaatccccaaagtagttagtttcccgtgcccagtgggtacacaacctcaaagcatcctcatgtagctggccctacctgtcattcttatctctagccgtgttactttagagagggcttcttggatcatactttccagacagcacctcccagtctctttctagcctacaatgctgctttacttttttcaaagcatcctataaatatctgaaatgttattaagtactcatttgtctacctagagataactcctcttcccccagccccaccctgctagaacacaaagagataactcctcttcccccagccccaccctgctagaacacaagctctgtgagagcagtcgttgtcagggattgcatctccagtaactagaatggtgtgtggcacatagtaggcctcctggagatgttttgttaaatgatgttatttttcataggatagaagtagtaactcacctccttaaacttttttatgctggcaggagatgttgattgaatatcagttggcatgcatactacaccaatatccaggcaagtcattaaaaccctaggtcccagatacggcatccagcctgtgacctgccacaagtggtaacatcaggctaaatttaggccaccagggcaaaagtgccatgaatacatcagaatgtacatatatggctgggtgcagtgactcacgcctgtaatcccagcactttgggaggccaaggttggcggatcatgagctcaagaaatcgagaccatcctggccaatatggtgaaaccctgtctctactaaaaatacaaaaaaataactgggtatggtggcgcgaacctatagtcccagctactcgggaggctgaggcaggagaatcgcttgaatctgggaggcagatgtttcagtgagctgatagggctctgcactccagcctggcgacagagcgagactctgtctcaaaaaaacaaaacaaaacaaaaagaatgtacatacgtgaagcagctttgcgagtagaacaatttgcactcctggtcagttggacaacagctgtttgctaagaattctgactttctgtgctcttgcctgcaactttcccacctctgagacagcctccagcttgatactgtattggctgttaatgctcatttataattaagctgagaacacacatacacatagataaagcataggggaaagtccagtgtgttagcatacaaagccattccgaggacccagaacagtccttgtttaggaagggtggtcctgacatcagaaatgataggattttcctggctgacaaaaaggaacagacccataccaatctggggattagaggcccaagggagaaagaacccttccatctgactttcctgattattaatccatttctcatggattagcaagacaataaactgtaggaaagccagtgtaggcattaagacccaaagctgttaatagaacaagggcagagagtagaatggattgttacctatgctgacattcctgggagagactgggtgagcccactgctgctatgaagatgttcacaagccttccacgaaatagggctctgagccccagcctccccaaggggactgtagttcattattgtcatcattatgtcatgcatcatcatgcatttccctgtctacaacatgcactaagaaagctcacagatgcacaaggctattatctataagaatacaaaacattgctataaaccaataacaatacaggcagcattcagctttcctcacagcatttaataatagtaagaataagaggtaactttactgagtcatctgttggattttaatcttcactacagccctatgagttagggtcattctcatctcatctttttacagataagaaaaccgaagtgcaaaaagtcaaatgaattacccaagccatgcagctaataattggtacaggcaggctctgacaccagcgccatggccacaggaattatgttcataccacctcccaccatggctttcccacagcaagtgctcacctactcttatgaggagccaatatattcagagattgaaaaatctgaatattgcttatgttctgatcagaggtctagctgcttcaatctatgctcagaatttcactcatcaaaaataattaggaccagggacagtattatcccactgtccaactagggaaaccccattcctagcaaatgtggtttggggcagaagcgggcaacatcagatgcacagtccctcactcaccaggatgactttctctatctccttgggtgcacaccagtgaaacatcccagtagagtcgtacttcttcacattggagtccatgttgtcaatctgatcattgccaggaattaacaaggggtcatgcctgggaagaaaaggacaggaaaacctaagtggaaaatgtgataaattataaatggaaagtgccccctgaattacatctcagaggatgtgaaagatgcagaggaagtggttgtcactgaaggccattcttctgcttacagaatccatcctttgagagacaactgccccaaaccaccaccccacttctggaagtgcaggtgacctttgtcagggagcatttctgcctttcccccgctcctcttttcctaaatggtcttcctaacattttgtggattcagcctccctttttaaggctacctcactcctcttcctctcattttaccagctattcgatctccccagcgtgcacacacacacacacacacacacatacacacacacagacagacacaccaaagggttgctatgagcctcggcaatgaagaggaaggaataggaatagagcctcatgctgactgactggcatgaggatggaaagccaattactcgctccttctgactacaacttctgacgtgatgctcttcgcagtaaaagctttaacaggctgcactttaaatattttagcaatttgcccaatcagattttgctctccctggctgaagcctttaaagattcagcagcatgtcacttcagagcagactgactaccaaatgcccacatctggaatacatgatttcaatactaaacaacaccctctctccttgccttgacaactgtatatgcactaaccatccaatgatgctccccaccaccttcacctcccaactgctgcatatcttagatgagagcctcaagctcagatgcatcttaataaacttgtttcaaattctcagggcaacattcgccctctattgccttgtctattggtggaaaaggaagatgcttccataaaggcctcccgtctagtgggttggcagagcctcactgacaaccttaagaactgcaatggaatcaggcagttctaacaagcttatagcacaataaataagctcctgcaccttgaatcatagtcaatgtccatgcttttatctctgatagtgattcagcacctcgggtttgggaagtcattgttccttcctgcaaaactggccatataattaggacattgtcccagctatacttaaccactcttgaaatggagctatcttttctgagtaatattgtcaacacaagacagaaaatatacatcgggtcacattccataaattgtaaagtgattttaccttttgaaattctatatttcaacatcagagggtgacttttttcttttttctttttttttttttttagacagagtctcgctctgcagaggctgacttttatttactttttactatttgtccttctgaaatgtctccgatacttcccacttatatgtcaagagtacagagtgggacagcaatctcttccatggcccaaaaacctaggattaagcttttgaataactaccacgaccctccaatatgctccccactcccacataaggtgagaaaactttctcactgcctttatttatgcctgagaatttgcttttagactacaccaaatgacaaatactatgtgaagccaacttgcaaagttatcttcaacgaacatgctagactactataggaatatctgtcatatctgatcttaaaagaagaacaatcccactccgagtagcatctcagtgtctggattgttgagaggtcttgaggtatgtaaaccaccaggccatcttccaaatactgaacttagtcaaagatgttaagataaaaaggctgataagaactatttacagatcagggtgagagcacattttgagggatgtttttgtccttgaagagtctttaacagttgcatagatatctattaatattatctggaataggtaggtagacaaaagccatcatggagaagaggtttgagaaaatgaacaaaattaactctttccagcccatgaagaacatatttcagttgcaagaggatattagcagacttgccctgaagatatagagccaggttcaaattctcttgccctgtttactggttggagagaaagtattacctcaggatgacctgagacctgcccctagtgcatttaggatttaaaagatactcagaactatgttcccataatatcagcaagcaagcaaatgaaacagcaagctgacaaaaaacacttttagaaaatgtgtgccttggggaagaggagatacattttggtttggtatacttgattctttctgggaaggagtcagacgttgttaacagtggcctacaactttcatccagaaaagcaaataagcaagcctgatgatcgatcgcccttcaataaaaagaaaaaagacagctaatgtcaagcttcattaactggggtagtggtttccagaaaccaggcataatttcacactggagctcaagccatggtttgcaatggaacatccagaggcatccaggaagtcttagaggtatgccacactacactctactccccacacatctctcatcctggcctggaccatttaaatataaacaatccaggatttcccccaagagactgacctgaggaacatcaaaaacctcccggaacaaagacattaccctctctgaccagcatggtacctggaattctaactttggtttattgaatcagtaaagcaaccaattgaatcagtaaagcaatcaataagaatcccctattctgagcatggaatggaggctacagtaatgattaagataaagtccctagtcaaagagaggtccacaagatagcaggaaaaaaatatatatacaccaatagttcaatagttacagtaccttgtggcaagtgttacagcaaagtacaaggtgatacaagaataccaagaaaaaagctgttcatatcctggtatttgggtagcattaaggaaggttttgcaaagaaagtagcatttgggccgggcgtggtggctcaggcctgtaatcccagcactttgggaggccaaggtgggcggatcatgaggtcaggagatcgtgtccatcctggctaacacggtgaaaccccatctctattaaaaatacaaaaaaattagccaggcatggtggtgggtgcctgtagtcccagctactctactcgggaggctgaggcaggagaatggggtgaacccaggaggtggagcttgcagtgagccgagatcacgccactacattccagcctgggcaacagagcgagactctgtctcaaaaaaaaaaaaaaaaaaaaaaaaattagcatttgatctgaaccatgagaaatgaagaggaatctcagcatgttgcagtgttgatccactaatagccagtaggacccacccagagaattgaggcccaaatgaaaagggccaaataatggcacctaaaaccatggctgaagatgccccataccataccacctaacctaaggtacagaagactcagaccaggccttccagctgtctccagatgtgcaatgacagtcaagttgaagatggattaaactgattgagtatgactgattgacagcagactaagaatgatccatgagattaagagagaacaaaaatcatggttccaaaacaggaagattgttataaaaattgaaagtaattcaaaaatgaaatgagttgttgcccaagacagtgggttttctatcattgagccattccacaagagcaagggatacagtgagcatatgcatataaaggttgggcgagcctagaagatcctgaaggtttgaagcactgtgctgtcactggagaaagacacagctagaagaattttgaaagtactggaccattgttggatatcagaaggctggagagccctgagtaggtaaagaaaggttgctagagtgaagatgagaggtaagcagcgtgggagagggattaatttatggctccagtaagggccagcactgttacacactcactggatttcacagtctgggagtaagctgggaacacaattcgttccagcaacaatagagtctgtaactgtttctggccagacagtataaatttctttactatggctgttgctgtagtaatttcaagtgccttaggctggcctgtgctgcagagagatctctggaacaggtggagagtgtacagtcagttgtccacagggactaaatcaaagtttctaaagcttctattgctagaagaaagtccaagcatttgccattgagcacaccaatcaacactgctgtgatccagggagacccagaggaattgggccgtttgttgtatggaaaggaggatcatgagaaatctccctgaacaagggatcccaacatcttcagtttgcaaggtgatagagacccacttccaaagcctctcccacaactcctcaaagaccagttagttgaaatcaaggaccaggattagatattgtctttcacatcataatgacattacctaagtcttccactcacaaagtaattttcaatttccctaaaaggcaccataattaattcaaggctcacttgtcacttgcgacttagccaatgtacatgccctattttagggtaatagaaactctatgatgtgagatatatctgctgtttcatttttatgggctgaactgtgttctcccccaaatttttatgtgaagtcttaaccgccggtacctcagaatgtgactgtattttgaaatatggtctttaaagaagtaattaagttaaaattaggtcattggggtgagttctgatccaataggactggtgtccttacaagaagaggaaatttgggccaacttttccacaggagggaaaatcatgtgaagacagagggaaaagacagagatctgcaagccaagaagagaggcctgaaacagatccttccctcagtacccttgggaggaaccaaccctcccagactttcatctcagacttctagccaccagaactgtgagaagctctgttgtttaagacactgggtctgtgatacttgattacagcattcctagaaaattaacacaatagcccaccttgaagaaaaacaggcacaatatatcagatatcccttagctgaaggcccccggctgcccttcttgaatcttaagtttttcttgtccatttaagggggggaaaaaagcatcccgccattatttcaggaatacatagacatatatatgtaatacccagtatctcctctaaaggttttcggccaatatccttcccctctccaaccaccttctctaccccaccaccaacatacaggcatgttagatctgctctgccagagtggtaacttctctccgtctttaacttagacatgcatttgaggatcaatgccaatgaaagcccagcttaaagcaaagaggaagcctgaacactagccagctaatttgagcagtctgacttatagagtccatctccaaatggagtgttcaggggttgataccactaagggcaggaaaccacctatttccttagtgacagtataccatagtggttaagcgccctggctccagagccaaaatgtctgtcttcaaggcttggctcacctattacttgctaagttgtacattgccttagtttcttcatctgtaaaatgggaatgttaatcattagcattattcaatggattccatttgaggattacatgagtaaagatatttcatgccctgaatacagcatctgacctagagcatgtcctcaagaagtgttaactagtcttatggttatcatcctttatactttgcttaggacccactcatgtattactagctctgattatggtgaaaggaggcaggaaagggagagcagttcaataataaagatatagagctactgctattatttctactactgctactattaatactactactattgctgctactagtgctattaccattgttgttactatgatgaatagctgccatgagtccaacacttccaaatgttggtgcactaaaacttttacctacattttatgatttgctactcacaagaacacctgtaggtaatttctgttattatcgggctctgtgtatacatgggaaacaaaatagataagtaacatgctcaggtggcacagccagtgagaggagaggcaaagccttaacaaaaaggtctacttggctgaaggccagtgctgcagggtgcccacctcataccctcccactttaaggaggcagccatatcttgttcattctccatcaaaacaccccaagttgcagtgttctaagcagccaagaaagggaaaccagcatcgcaggcatttacaaaatgcaccacttatgtgaatgattagcagaaattcaccccataacccttgcatctcagctcaccctccagtgtccacagctagaaattcagtgtgcctaaagtctaataaggaacacaggcatggccaagtatggtggctcatgcctgtaatctcagcattttggagggctgaggtgggcagatcacctgagctcaggagtttgagaccggcctaggcaacatggtaaaaccccatctctacaaaaaatataaaaattagccaggcagatggtgcacgcctgcagtcccaggtactcaggaggctgaggcacgagaattacttgaacccaggaggttgaggctgccagtgagccgagatcacactactgcactccagcccagcaacagggccagaccctgtctaaaaaaaaaagaagaagaacataggcatacctcatgttattcaactttgctgtattgcactttgcagatattatggttttgttttttttttttttttttttttttttttacaaattgaaggtttatttttccattgctagagcacaggcagagtagatttcacataattcttaatgcctatgggattttcagaatgttaaatgagctttgacttcaacttaaagtcaccagctgcattagttccaacaagaatcagcctgtcctttgaagctttgaagtcaggcatttacatctgtttacagcatgatctactgaatattttaatcctgctgttgagacctactgctcagagaaaaagatttctttcaagatgttactgctcactgataacgcacccaattattcaagagctctgatggagatgtataagatgaatgttgtttccatacctgctagaacaactaccattctgtagcccatggatcaaggggtaattttgactttcaagacttattacttaagaaatatatttaataagctatcactgccatagtgattcctttgatgaatctgggcaaaataaattgaaaaacttctgaaaaagaatcgccattctagatgctaataagaacattcgtgattcatgggaggaggtgaaaatatcaacaggagtttggaagaagtgaattccaaccctcatggatgactttgagggctttaagacttcagtggaggaagtaacagcagatgtggtggaaaaagtaagagaaatagaattagaagtggagcctgaacatgtgactgaattgctgcaaactcatgatcaaacttgaacatatgaggagttgcttcttacgggttagcaaagaaagtggtctcttgagatggaagctactcctagtgaagattctgtgagcattgttgaaatgacaacaaaggatttagaatagtacataaacttagttgatgaagcagcagcagagtatgaaaggattgactccaattttgaaagaagttctactctgggtaaaatgctatccaacagcatcacatgctacagagaaatcttttgtcaaaggaagagtcagtcgatgcagcaatcttcattgttgtcttattttaagaaattgtcgcagccaccacaatcttcagctaccaccccccgatcagacagcagccaccaacactgaggcaagaccctctaccagaaagaagattaaaactcactgatgactcagatgattactagcatttttaggagtaaattattttaatgaaggtatgtacacacttaatagactacagaagagtgtaaacctaacttttatatgcactagaaaaaaaatgtgtgttacttgctttattgcgatattcactttgttgtggtggtctggaactgagcctgcaatatctctgaggtgtgcctgcaaaagatctttgttttgaggattcgcagagcaagaaatgccacttggcatcaattaatctcaggaagtgaactaaatgccctgctacaacaggaacagaaaaagctcgccttgaagacaacagcctaaagcaaaaccacaaatcccttttctagcaaacctgctgtgaggaagctgatatcatattttaaagtgcacaatttcccttacaggcaaagacagcaaatcccagttccttcggtggcactgggttcaacgctggacttcagaaatttacatgaaagtacaaaaaaccagccaaacacacaaaaatgttatgaaaaaggaaagttacaaaatggctagaaaattgcattcttttctctgcttgattttcgagacctcatgtcttatcacacgataaggccttttctgtcattatgagcatcccatccaaattaagggcatcctacagtggtctccctgggagatgagaggcttgattaaaaggaggtgaatttctcatccctccacagaccttttatccgagctgcaaatactgactttattgagcatctattatgtaaggcaccatgatggggctaacaagacatttctcagacttcacagtttggctcaagtgttcctcataaagccatcatcctgaacagccagagagactgaagttattttcccttcctgggaacttctagagatgctccttcggcaataataatttccatgtctgttttatccattagatggtgaactatttaggggcagggatctattttgctcttccatgtatttccagaatccagcagaggatgcaatcaaactaactaaaggaactgatgaatcatctctagtccccaaacactcttcaagcagtcaacagagactcagcaaacctttcgtggagatccaaaacgtgtgcagtgagaacccatttacctctgatatcttgcaacaatttgtttttgaacaatcagggttcttgcatcatttttcatttacagggactgcgtatgaattaggacacagagcatttgctataaaaagggcattgtgatgtgaaggacaaccctaaattatgtctctaaccagtcaaggctgcctgaagttcgcctggagccagctgctgtaactaatcagcagggaggactcatgtcagtggtcagacagatgttcttaattaagcaactatttggttctccagtgcaaagtctgaacacttcttagagatgggcccccatcacttcaagctcctctcactgttctgattcttcaaaagagtggttctcaaactgtggcccagaccagccgcatcagcatcacctggaagtttaacagaaatgcaaatttccaatccccaggccagatctgctgaattagactgtgtagggctgtggaccagcaagctatatcttaacaaagccctccaggtgattccgacacctgctaaagtataagaaccaccactataaagttttgcccagatggagaatctatatggcttcagtaaatcctacccaagttagcaattgtcaacaacacacagattataaggctgtagttctattcagcaaagccaggactacagctagacaagagggtgcctagggtgcaaaattgaaggaggcgcctcacattctgggtgcctactctgattctctgtgactctgtggaactcgaggcattgtgtcaacacttgattcttgatggggatttactgactagatgctgcactaatgactctctcttgctgacttctcttcccatgagctaatcagcaaataaatttaaacaagcaaattaaatactagtcctcgcaaagtgcaatacttacaattcagtgttctacccttctttaacaacatggtatctagtcactaagaccttgagcacaatgttcaagaatatcaggccacacgggtctgtctgagcctgtatcagacacagaaggctggattaggccttaggtggtctcctcaaaaggaatcatagttgggtgttcagcaccataaatggttccaactggatctgcctcattcttgggtgccttggctcctgggtgattactatttcctgatacttcctgaggctttgcagagcaaatcctggctcctgccttaacacatccttcaacagggcttccactcttctgataatgatcatcacccccgagacaccactgcccaccaccctctccccatctcccacttgacggccatccctggagccacactgacaaaactctcaggccaggctgtagccaccctggcagaactagggtccttttcaatttctctgcatctatctacttgcattattttccctgctgccacctaagatgttatctagtgttaggcagccagcattctcagaagaaggaaatggttgcctttatgtttgggagacagcctgggagaaccaacacgttcatcagtcctacaggaggttgtacaagatgctcttgacacaagagggcaaggtcatgaccatctgctgagcatgaacttgtccagggacctgtgtggtccacccaagcctcagtaccatgacaccaactacttttttcttctccagtcctgggggaggcctgtcatatgctatcagtttgtgcattaagagatgaatttacttagctaagctgtccctgccttccttctttcttttgcccagtggaaggaattgtgagggtgacttggctcagtccattttgccattttctattactaaaatctttcatgctagcaggctctgatgtgagaagtcctaacaaaatgaccccacgaaaggtttgagtcaaaagagaggtgatgagacttaacaagtagatgagtttatttcacttaatgaccaggagatgcccaagaggataatctgttttcctcaaatcatattttgcctcccattcaggaaactaatgtctaatattttctgggtctcctgacatgaaactctcctcaaaatgttcaatttcttttttctgggtgttgtcaattatccttgccagcccagctgggtgctatctgtgtaaactgtccacctgatacatcctatgtaaatcctaactttcactgaagttttcattgaaagtttatagggttggtaaggcccccaaattaagaactcttgacctagctatttagagacaaagtctgtgctccccaggactttacaaatgaggaaagatgtagctatccttacaaggcaccaccccactaagtagggagaattgggccacgggtgcttgatgattttagaggaaaactaggatgattttagaggaaaactctaggtctcaggactgatgtcaggaattacgtgtgtccttgggaaaactatgtatcccagtcctggtctactattctacagcagaccctgaatggcttagcacacaaacggccttggcagaggctggggttgagtgggccttctatttcacacctctgtgcttatgtagtgtgtgtctcagaaatctcctgatggaggactcccaacccttctctctgctgccaccagtgattcccccaaaacacaagttaggttaccgcctcctcgaaaaccttcaggggttccctaatgcctatgacaagcaaaaccttcatgactgggtgccagaatactcttacattctccactccatctaggccactccaaagacccctggctatagccacacccaggcatttactgtggtctgagcactgtccctatgtcttccatcatcctaattagggaaaacttacctagatttaccagactttacatttctgtacctcaacatactcacctgtaaaatgggggcaagagtaataactacttatagagttgtagttaggactcagtgagttacaggcatccagtctcggtaaacctagacaagtaatattattagttgagcattctcctcatggtatggaactaggttcaataagacctcctcctaaaccaggctcagcctcccaaaccagaggtaatgacagctctttctattctcacagcccatgctagtggaacccccagcttgttcttacccaattctgtgtttttatgtgcttgtcttctcctctgctaaactataagcattttgaaggcagggatctaatctaatctattagactgtgtggaagttctttaagggatctaaagtcatttgggtgctagactttagattccttaaagaacttccatgacaacttgcacacagtaggctctcgctaaatatttgctggatgggagctaatctgagaaaaagattaaaagcaggcagccgaagtgcacagactttttggattccatgtgaggattcagtgtgagaacccaggtgtttactccataccacctacccattggagaaatctcatcaaccaaaaagcatttgtacgtgcaactatgtggaggtggctctggaataaactgaatgtgattgtaaccagggatcctgaatggagatttcaggaatccattaacctgcttcaactgtggtaaaaggggatcaagtgtactttttattttttcctagaaagacttcctagagagttttcattgaaggttcatagggttggtaaggcccccaaattaagaactcttgacttagctatttagagacaaactttgtgcccccctaggactttacaaatgaggaaagacgtggctatccttacaaggcaccaccccactaagtagggagaattgggcaacgggtgcttggtaattttagaggaaaactacgggaggctccttcaataattccacagtaagagaccgggaaggaagggaaataacaggcagagagagccggggacttggaagcctccatggctcacacctcctctgcgggtgtggagccaaatttatccatcattacacgtgtgtcctcagcctggggcccagacactcgccattcagctctatctggacatgagggttgttttctgttgaggtgactcaaaaacatactacctcaggatccagatatacaaaacaaggctgttcacctaatgatcgtgcagagttaagtgacacttaaacactagggtaagcctgatacaagaacaaagggaaggaaaagaccattagtgcagagtccccgttgcatctcctgctggcagatgatttggaaggagccttcacgcaggagtctgttttatttgcagaagccacagtggtaaattacagcccatcctagcccattctgggttctccagttcctcttggagctattcctgtcactgcccataggccactaaaacctgcccgcattcagaatgattgattctgctcaaactgcaagtcacaaactcatgtcgaaaaatccacttcaaataagtcattagcttcctttatggatttttcaggtcatgaggaataggacctgaaagtcccatttactggagagtagaaagcaggtgtcggaagaggcgggggcaactggaaaagccacagggagctgggagagcccttgttttctgccaatcaacaaagggggtttagcaaaaatggacccatgacttcattgccagtgccagatattcaaatgtaaaacaaagggccctgaggtctttctgtaaactggaagtcaagggatatggagagagggctcaggaggggtccatctttgctcccaggtcagatggagaatgtggagcacctgggacatagaaagacgtggtaagggaggagtgtctaagactttctcacttgtcatgggatggcccattccagctgggctgcgaagggagaccatggtgggctggtgggataagacatcccagcgacaggaactgaggccttagcagcagcccaaaggcaaccaacatgagaagcccgagttctgtagcttggcaagtttccactcaccacctgacccacgtttagcaattttgatgtaccatgaaacagacagctccagcccaggatgactgcctccctcagcccctctccagcaacgaatgaaagcaagatccactttgaaaattctcccccatcatgcaaactgacacaggcatgcttttcaaaaacccacagccaatctgttgatcattacttatttacaaaggccttcgggcagaaagtcctgtaaaaaccatacttgatacgatatacactagctttttctgcttgtggaaaaaaagtccccccaaggctacctcaaaccatcactttctattgcacataaaatgtagcgtgtaacactaaagtatttaatatatatggtataatatatctacaggaaaggcatttgtgtagaagtatgttaccctggatttggtaatttgatgttttgctgaaggctacgacttaaaaaagcctccacctcatacagaagacctgtcatcttggtacccaagagccaacagaataaagaagtacccttaagcagcaaaactttgacacagctttgaagcatatgaaaacagtataactcctcagaattattattactcaagatcaaagaaatgagccatactttacatagcaaacagggacagggaatttggctccaaaggtttcagatttttcagacttctctttatttatttatttgcttctctaaatttaggtgaaggaaagtggctgggcttttctctactttaaatgggaataactattagaattagataaggtgattacctaaaggtgagtaaataggaaatgaatgctagcatgacactggcatcataaaaacgaaaagcttggcagttggcacattttattcctcctcataaactgtaaacaagcatgcaaatcagccaaacccaaggaaggctgggtgaagtggaaggcagagaacttttaaggaaacatttaacaggaatagatggtgatatggaaaaggagttgggcagggtgagtcttccacggaaaacctgtgtcctcaaccacatgaagaaagactgcccttgcctattttccagaaaggtggatgtggagggccaggaacatgcaaatgttattgaatatggggagtggaaatcaccactattctatttcaaaaatcaaagccggtggccatgaaaagacaaaactaatgtcaagatggcaggcatttccagagcagaaaccacatagggtgagcagtgcaaatctgaaatcactcctgtttcatttgggtggtagagagtcaggatgtcggaggaaaaaaatgctgggattggcagatgaattgaagacaaaaaggggagataaaagacagataggccaagaagaagaaactgcagaacgctgttgaaatttgacttcacttgctatttaccagaggaagccatagtcaagaaagaagtgagggagaaagagagagaaggaggaagggagggagggagggggaagaagggaaggaaggaaggagggaaggaaggaaggaaggaaggaaggaagggaggaaaggagggaacatgtacatgcatgctgtatttcataattaatattgcttttagcctgagcagaactggattacttttgaactttgctttggcaagtccacagattattagactttttcttatcagtcaaaatcaattaacagaaatttgatttcaatcgacaggataaaaggaaggtaatcttcaggttcatttttgattgtgatgatacatctcacatatggccttaagtacagaaaacagtcctcggagggactccagcagaaagagactgccgcaggcaaactaaccacacgagtttctctgattggttaccgccatcattagtgccactgctgtttaggaactacacacagacaggacatggtgacagctaagactttaaagcctatgtatttttcaaacagcttttcaaactgtttttcatgacagaattttttcagctctatcattaactgctgacaagctgacagaataaatactccagcctttaagaagccatctaacgatctcgctcccctcccccaccccgggcttgctggggaggggagactctgggcctggcagggtgaggagagggcgaggggaggaagagaagggctaagagggaaaccgtgggcaaccagcccctctccttacctcatcagcttaggcgaggtgttgggtgagttccgcatgcctccattccgttgctttttttttggtgatagtgttgacggctgctcatcttcaactggaaatacaggcagctcatgagattatgaacagtttgagggcagactgtgcaatacaggcaaaatatcaaaggacacacactcaaggctcagtcactcactaggaattcatggctgtcttttaggacccaatgacaaagaccaaatgtgttagtcaaagaggccggcttagagaaggtgaaggcaacacctctttacactccagcctttgaacatacactttaaacagactaaaacagtttgtaaacaccctgccataagaaaaaaaaaaaaaaaaaagaaatcatgatttatctgtataccaaaaaaaatacttatcattattcttagagttaattttggttactttgctttgcccagtaatagactgcgttttgttgtaaccaaaatcagaaataaagttgtatttgaaatgtcagcataactgccagcctgctgcttctccagatgaaccaacttagctggttcctaacccctgcataccagagaaagagcgttgaaaagaggcaaggattcaaggccttgacagccaatgtttcaatcagatcggggcacattggtgcatgctggctcaataatccccagcccaactcagctcttatccctccaactgccaggagggagggcttgtggggctgtgccaacggggtcctttttcaacccatgaagacaggagcaccggggctggtgaggttggaggagagccccggaatgaaggaggaggttgccattgaatgaaatctctgatgatgcagcagcggggcagggatggagggcagcacaggggattggaaaccaaaagctgttttccaaatgtctaaaccacacagattgctaagcaatgtgaagcttcacttagaaacaccacagcacactctactgctcttgcccaaagacacccactaataagctttgcagatgtattagcctgcatcatgcttctttttaagagaactgcttgataattagcagatgcaaacccagcctgtcacccaggggcatcagcggcaaaattctagtcctcctctccccacccccacaattcaggctaaagctgtaatatcaagaaggaaaaataagatctttggattcttatagttgactgcaacacagactaggaggaaagcaccctgaaactcagaatgcacagcagttaccttaaagctaagaagagaaatattagcagtgatgacatcaaaagagacttgatatatgttaatggtgtaggagtcttagatgggggagaaagtgccatgtcagctacttggtattatccaggaagacccatattagagcatgcattatatggtacttccctgaaaacgctaaataaatttagtaggttatgatacatgcttccaaagctattttaataatccaactaccctccaaacctgcttcaaagtattacacattttacactctcctattctgctgtcagtttgggcttgtctaaaccctggctgatgcaggaaaagggaatgactgtggtgtaaggtgagagtgagaccagaagagatgaaggcaagaaagcacctgcaaacacccacagccgaccccctgtaccacctgcttcctctgacacccaccagggcccaagctcaggccgagactgtatcagtcatttagagctccaggcagagactatgtggctgggatgatatcgcatcttatcagaaatgagtatccaaagcaaatcacacagagactaaacagcacttaaaagattaaaggaaataaatacaagccacataaatggtattgaaaaaatcacttagagttgatatgcatctctcggcaagcaaacaggcactctgagcttgacctgaattcatcttcctttcacaggataggggaccaggcatctgaggcaataatggggtagaaaggcagcgagggtgtgtgggtgtgtgtgtgtgtgtgtgtgtgtaggtatgctttcgcactttccccatcttagaatgaagtagaaagtcttgcactaactagacgtataagacaaggtcatcttttaatatgggccacttgcaattggtgtattgtgttcagggtgacctagactggttgtgtagcatgctggagcaaataacacgtgtgtgtttgtgtgagtgcatgtgagtcactctagtcggggtgcaagttctgtttttctcatcttaaggttataattcagttagacttcttaaggttataatcccacatccaaaggtttttatctaacctagtctaccacggctagcatttttcaaggtcaccagatgctaccatggttgtgtccagttacacaatgaatctagatgagttaagacctgaacagaagtcatcctccctagcatgcctgtgggattattttgctgagcattggcttccctttttgcattgggcctataacaaataatcctctttggttaagtggccattatctttacaccttgttgctacactgatcttcagatgggagagttgcaagttaatacctgttagccagctcaagggagacacctcattctggtagtaaagttatgcctcttctatgcaaagaaactatttattttcattgcaactcagaaagatcatccatcgtaatcatactgcatttaaagtgggatttgttctccaaaatgaaacttgtgtttaaaggtttcctcctgcactcacagcctaaaaatgcagatctgttccctgaagagatgggggaaaatgtctccagcttaaatatatgaacgctgtgtaatggagaccattacatatggcttaggtccctcaagagaagcagtgataacttctttctcataagtaggatataaaccatatttaattatcagcctttatatggatcctatcaatttctgcataaagaaagcagatctaggaaaacttttagttaagctataaaatataattttcatttcatggcttctgtgactacatgagaggaataaaaatggaattaaaagggagacttaaatttactcactttcatgaaagacaaacgtgttgaagtagtgggccactacctcatgacgatgcaaatttacaagctcttatttaacctacattttggctaattacaatacacctccatctatggcattttcacttgccttcatgctgcggaagccacatgaagatatgatcctttaaagaaacctgacttctttagaacacaaacaagttcaggaatctaacgtggaattttataggagctgaactccatccagtctccaagtactcataaaattcaagggcttgtttttgcacatccctaagtataacacttaatgtgctgttgtaacttcccagcgctcccttgtctaataggcactgaatctaacagttttacagtttgggaagactcagtgctagaaaaatgtcaggcaagtctaatgaggcttcagatcccctggtttgcgctagagtttaatttaaagttacaatgatgttttaacatgtttgcttatacttgactaaagaggattcgttatttcaatgacataacctccagacaatgttctgagaattgatttaagatgtggtggtaattccaacagccttaatgcagagttgaacatctgtaacaacattttactcgacttttcatcagcattctgttttcaagcaaaagcaacgtcttccagaaacactggccagaactctgggcttacttcaaaatgattacatatttcactagatttttaaaaaaagaaatatcttcctttatcagccgcgccagactgcaaacactgtgtcagggtttaccaagcctctttatggtccttggagtgaaatggggcaatgattgcaactcccagccttccctaattcagtctaatgcctgcattagatggacctgatgctcagctctagcctggggcacattccctctgccctgtttccccagtgagatttaaggggatgatgccctttaagatttaaaggtgagtttattggctggagttaaaaaacagttcaaagcaaataaactcagaaacgtaataaaaggcaaacaactcataaacatgagtcaaccgctatctccattatgttattaatcaccacatctggagaaacccacatctgtacacacttagcaggtcattagtaatgtcatattcacactggagtcactcagaataagagtcatgcaaagtggtttgaacacaaaggcatctagctaacagggcttccgactgaagtcttgcacaagctgccagtttgggggtgaggtcgttttaattattattaatcgttttttacggttttcccttttggtattttgctgcccaacaagctaagtgcaagctgaaatccacagtagtgcatcgctcttcttcaactgagctcagcatggtaaagtagaatgttgagggctgcagggtagttattaaaaatgggaatgggtcccagtcttccttcacctggctcggtcacaagccgagaattgggagtctccttcttgaactcaaatggatctttggaatagcgtgatctagctgcaaccttgactgccaaacaataaggagaaaagaaaatggaaattaatccatagtgaaatttcttttagaaaagttccaaacaattttaacattgaatagctttgaatcaaactggaagtttctccctcacagctgaattgccatttttttccctttcttttaccctgatgacttcctgcaattctttttgccgtcttattgtcatctgtatcagtagggataatacttctggaaattcagaagacaatcttcttggtataatttccaaaaatatactgagttccccgtcaccccacaacatgtacagacaccgaaaactcagtttagcagcaggatcagacccattctttcctgaagtctgctaaaacaaattctactgaataatcattatattccgagtcatcaatccttggtgataaacttttgctgtctgtctcgaactgccggcttggtcagcccccttagttgtggtatcagtgcctaacattaaatgccgtgagtttgccactcctcagaaagacagatccacggcatttccttcggccgtcagcgacaccagtgaaaagtgggtgtttcaaatgttgttttactaaaatgaagggtatggagtgatggtaaaattcctggaattttacaacagtcgtgttgcaaaatgtaattcaccatgaacaaaactcccaagctgacctaagctctctctgatatgactgtttaagactttcaccagaaagtttgtgcaagttaactctcaaagtcttacggcatggccacaagagcgcagtctctggattggaggatggaatggtgcctggctgtttctcacacgaaccagacgggtaagagggtgtggttgtttccttaagcgatgatgggaaaacaaccacaaaaataataatacatgccagctgaacaacccatactgtgaatttggtagtatgattcctgtaaaggagcacttgactgctgtttcgggatggatcccgtggtggggaatgccatgtgtccatcgacgaggctgagctattaagcacagctaggatcaggcaagccaggcaatggagccaagttctacgcccagagagtagtgggcagtatcagggtgcaggggagttaaagtgggtgatgtccttggaatgagagtttcttgcctgacaaccttgaatagcacatatcactaagaagtttgataagcactgcagtattcttcataaaaatcaactataaatctattttttgaaagatcgtggctaatattttctttttctgagacaaggggtctttgttgcccaggctggtgtgcagtggtgttatcttagttcactgcaacctctgacatcacggctaacattaatccacagattaggaaaagaagaaagatgctgccccttaaaagcaaccccaacgatcataatatctcaaacatatacacctctctaaaatcaaacaaccacattatcatatacattattctggcaggataatttcacaacttctagctaggaaataggaaacacatttacttggaaaacctaatgggtatcagtttttaaaaaatctatcgttatgcagaataagaatttcaaaaaatgtctaagtgacctgtactgccctaggacaggcatagggagtgcccaccccatggtaggctgccagggcagggaagggaggcttgttggagcttttgcatttctggcttttgtggagctaataggaaaatggggagggagactttaaggaacaataggttatgtagaagttaatcacagggtgtatttctggctctattcactgcctaggaaacctgaattgtgtaagtttgagtccatcaacacagagtaatgaaagaattcagctcctccataggagagagaaaaaaaatactatataaatatatgaacagaatccacatgacatggaatgcagtgttctctacaaaatactgcgggcctaatggatcctctagaatccaattgggtaaattagatgtgcccatgctacccatgccataggccctcaaccccaatctcaaactatgttctgtatgcatcctgagaggaactcagcatgtaccaaagccccccatatctagaatcgcagctcatatatcttcgctgtagacttgacctgttagaatcattgcccaacactccgccctgttcagtattcagtagaaaatccttttggaattttctggttgcctttagcccttttctttttccctggaatagactctctattacctcaagggcaaagaaaagtctcaagcaaagatcactaggtattagtttcttagagatgagacacagagatgaacgatggaattctaagaggaaatgcacaattgaaaagaaaaattcgagaacttccctgaatttttgctatggggtttggagaatgggaaggtactaggagatgggagataatttttactttacatccaactgggagggctggggaatgtatagaagtccaatacaaacagcccctcccaactttcctttccttctctccctactccctactcctgacaccaaaagccaactttcggctttgtggcaaaagttaaacctgactcctttaggttgccctagcacttgcagtccgcgtttgtgagggacaacttttagagtagggatgaaacctgccacatcctgggcaccaacagctgcttctttctcatctttctcaagttcaggggtcagcaaactgtagcctgccacctgtttttgtacatcacatgagctaagagtgtgtttacatttttaagtcattggggaaacaaaatctaagaataataatatttggtaacccactaaaaagatatgaaatttggtggctataaataaaattttatcagaccatagccacagttgttggtttaccagccatccctggctgcttccatctctaacgacaaagttgaggacttgccatagagaccatatgggttgcaaagactaagatattaactcgctgacctttgacagagaaagtttgctgacccctgcagtagtttaatcttctcacatttcccttgctttccagtctccacaaagaacaatgttcttcccaacctgccaagacagccaaataacaaaagaaatacccgtggagcccacctgaagtgcacagatctggggacattgggaggaacagaggtagcttagtgactctactgtccctaccacccaacctgctattagccctgctggtccgctcgtgtttgaggtcatgagtcaggtgagtttcacattttccaactcaagctaagttagattcatccacccagtactttggaaagcaaggcgaaccacatctaccgtgagcaattcctcgaagctgtcagcgtgtgctgccagtccaccctgcgagagccccgtacaagacaacagattaaccattagactagatatgttgaaaatatacagcttcaacctttccccagctagctcagagcgatatatagatgattatttcaaccgtcagctgccgcatagatttaaacctctgcacaataactcctggattcatctgccccttgtcaaacttgcacagctttagttggaggatacatggtgtggcagtttcactgtgaatccagaatgatccagacggctgctgtctctttgttaacaggaagccaaactgatgagtttgtaatgcatttcttatcaaaggtagtttcagaaaagaaaatgtgccccatcagtttggctagaatttcacatacacaagattataggcttaatcagaatatctctgttattttcttgaggaaatagataattccacatccattccattaaatcattttatgccaatgaattatgtatttatgaatttataattatccttgatttttcttccccttttgcagtctacttaataaaatcatcagctggagcttacaaagcaatagtgcttaatagatacaagcatgctaatatattttttaagtgaatgctgatctttctgagctgtgtgtctaaaatcatcattgtgaataaaagaattgtaatttccaacccatacatttaacaaagacaaagtggactgtaatggaatttatggagcctgtaaaggaactctttttctaagacggtttataatcaaatagatttggatttactgtaggtcaaatcaggtcccccgatgtgtatcaagaaaaaaatgcctgtaagataccaaacactgctcctggcaccctggaagggctcacacccatggctacagctgctagtttcctggtgtcctcattgtttccacccctagtgaattcagtacttaaatgtcagctttgaaatcaatatttatactgtcttcacttaaaattatgacattctgttcatcctggattttttaaattttgattattttgaaaatattttattttgatagtttgaaaatattgcatgaaactatcatttatcttgattcctgaggttttgggtctcctcttaaatttggtgcccagggcaaaagcttctctcacctcgcccaatttccagccctgaacaccatttctcaaaggtgtttgaggtactggttctgccaccccacagaactggacaaggcaaatctaacacaagacttatttcttttgatcacttcatgctgtttgcatgagattgttaaggaaggcccttgcaacaaacacttcctcgtggatttacaaattgtcaggcatcccaaggagtggagaaaagatcatgctgcctcaggaatctgagatttgccacctgcccagagtgagaaacagaaaagagagctggggtcaggtctctcgtggactttatttcacatcccacatcaaatcctcctggttaacacaatgttgatttacatttccactttggggtgaaagtttttatttgcttacatattttgacaccaatgttactttctttttctttccccccacccccaaacaggttcaaatagccatgactggcagaagatgtcaatcacatttcatttccattttcactttgctgtttacattctttaaattaatgcttgccccaatgattgtgatatttaaagaccagcctagaatctaattgtgtatatgtgaaactgttttctaaaccataagatgttatataaatacaaaccactattattattaacattattactattggctcatccggaaataccatatcttccattgagccaatggtgtcaagagccccctagaattctaatatatattccagatgggtgcactgataatttctttcaaactcagataaaggtaaaatgcatgggtttttagtgcaagccaggtgcccgacgaagaatattctgccagaacactttagaaatacagtatgcttttaaccttgggaggtaaggaccagtgtggattatgactttacactaaacacagcatttagtatatttcttaagggcataatcaccttctatagatgttcttgaactataaaatctttatctgtatgctatcataatttatcctcggacacatcctgtgcaatattttataatgctagtgtatggtgggcctttctggtcaatgcattggagaacaaggtgtggagtgcaacagaagggctggaagcggcttggggatgctctggcctcaccctcttttgcgtcatagctgcactcatacgcagaccctgacccaggacccaggtcggctgacttctaattcagatcatttgctgccagaattctgcctgtgagtgagaacagcatgaggatatgagcttcttgagtcagtccacctgcccaagtcccagctctgaccctctttagagctctgatctcagaccagttactccatacctcaatgtcctacgatctactgtgatccctactggaccaaggacaccaaatttcggagatgctttgggattatgtgacataaccagggggctgcaggctgacagcctgaggaccaactactgtccccagtgtgctgagcttggcaccaccctgctgatacacaggatttcacatgtgggacaatctttaagtctgaagattgtccatacaaatatggatttctaacttctaattaaaaatcttgtagaggactgagtcttcattccaaaagggtgccattctcctggggcaggagcttatcagctgctcaaatgccccactgctgcctactgtacccccatatatagggcagacaccccatgtttgcatttctggccctggaaccagtgacactcaagtgtaccatccccgaaataaagattttaaggcatgggatatccctccacaaatgcctactcacattgagtgggtagagaggttaagagttaaccacacaggtcttaaagccacattgttgggtctgaacctaggtatttggcaaattatctaacttcagttttctcaccaataaaatgagaattagagtacctatctaataggttgttgtgagaattgactgaaaatgtgaaaagcacttaaaagaattcctggtgagctctttctaaatgctacccatgattattgccttggctttgaagagtcagagcaatgagagttctctgctgctgggtccttctccacaccagtctgccacatttggacatggtgtaattcacatgggtccatactctctctccttccccaagcaattgagccgctaaccaacacttagaatggggtgagcattcccacccccacctgacccctagccttgcatctcattcaactgtcacctttgtcccttgtttcatatggccccaatgaagtgctcaagtcaaataattaggttttgccaaatgtcataaaaacaagaaaagccagaaaacgtttaaacggacctcaattggagaaggctggaaccattcagggcaagaacaaatgaaagacagatggggacagaggaaccccactgtttcctctaaattacaggaaattcacgccgtctgattgtgagggcctcttttctttcccttgaatttctgctgggaggtcatgggattgatcggcgtgtgcagacacatgggagacagaagaaggggcagaggcatggcggggtagagaggcagtgactccttcaccaggctctcccaccatgtcttcctttcacctgactacttgaccacccttgaagggacagcctaggctgcctcctccagggggccttcccagatgattatgacaagatcaattctctcctttctttaaaaaatcccctggcacttctgatctcatgccttgcattattataatttgtgttcaattctaatgtgttctactcccccagctaggcttataagctcctctgttggagttcacatatcactgagtctctcacaatgctgggccctgaaaagttcccaataaatagctccgagcagctacagaggcgatgttgcaaaggggagaagcacagcttagtgatcaggagccccggggttctaggcctgccttggatcaactgtgtggccttggcaagacacttccctttcctggggggatgagcattagttaagtatgagacccttctggctctgatttgtaatgactctgagtttaatgtcgggcatacctttttcttgttcttttctttaaaatctttttaaagatgcacaataagagagaaccacaagcctagccagagaaattagataattgcattaaatacgaatatacgaactcataagttacataaatgcaacagtacaaaagatgttgcatgagaatgtcaagggagggctacatgaaatgtcttagacaataagttaagtcctagagagagaattgttcaggaaaaaaaaaaaaaaagaaaggaagaaaaagaagacgacttgaaacaagaataggatgaatagagaggtcccgtatatccccagatggagcacagggcctggcactcagggggcacttgacccatgatgctgaacagactaaggagtggcagtagagggtgggaagggcatgccaggtggaggacacagtttgaaccaaggcaaggtggttggaaaatactaaactgtataaactgtaagaaagtcaatttggctagagcaggaaaatgtgtttgagggcacagttggaggtataaagggcagagagtgtaagcgtttacattccaaatgatagaatttgcacaatatttagtaataatctgaagcctctgggaaagctatttttcttctgatttaaatactgaagttcaaagaggatagtgggtgggctttgcatcttgcaaaagtctatcagaaactgcctagctcgctcagcccactttcctttccaaggtaagaaacacacattcatgcatggaaataaagcagggaggcccttggcaactgtccagttccattgaagttctcatttttcttttttttctggagagcttattcaacaggaaaataaagttatctaatgcctcagaaaggggtcccgtgaaactcacaaggcctattcctcacagcccagccaggtaaatttaccctgatttcaggatggctatttcttgtcttcaactactccagctgatcccatcccctctacagagaactggaaggaaacccgtcagggtttgacttttacatgaaaactgactgcaatccatattttcaaaaaatcattttcaacaaaaccagtgctttaaaatagattcactgagaagaaaatgtttccccaatcctctcctccttgattttgttgaatcaataacatttcaagatgttctctgtgaaaatcacatgggtgagttaaataagaacatacattacattatctagatcctcaacttgcagcccttagcgcagtatgcctgagaaaagtttaaaaactcaaaagagagaaatcctattcaaagagtaaaatactgcctatgcttccaaagttctttacggcctgataggtagaaatttaataatgaagggctgggaatggtggctcacatttgtaatcccagcactttgggaggctgaggcaggtggatatcttgaggtcagttcaagatcagcctggccaatatggcaaaaccccgtctctaaaaatacaaaaattagctgggcatggtggcatatgcctgtagtcccagctacttggtaggctgaggcaggagaatcacttgaacctgggaggcagaggttgcagtgagctaagatcgcacaactgcactccagcctggatgacacagtgagacactgtttaaaaaaaaaaaaaaaggaagaaaatttaataatgaaaaacataaacaaataagtgagtcatcctgagacatatttcaattctccccttctgtaacctcaataaattcattttctcccacataagctaatgtttgcactaaatattctgtacaaaggaataccgcagaccataaaaaaaacagtaaaaagatatagctgtgtcttttttaaaaaacggttgaaaaattgggtatgtgtggacaaaataatttttaaaaatagttttgcttgcacatttgatttctctcttcatttatgatgccctagttgatgagctgatcaacttttctgtgaaaagtcttcctaaaaaacagaacaaaacttaacagaaactctgatcctgtttgtcaaaatgtagttctggccccgagagaaaggcaatattctttggatgacttggattctaaagcaactcttttattagtattattatttactttttttttttgagacggagtctcgctctgtcacccaggctcccaggctggaatgcagtggtgcaatcttggctcactgcaacctctacctcccagttcaagcaactctagtgtctcagcctccaaagtagctgagattataggcacctgactaatgtttgtatttttagtagagacggggtttcaccgtgttggccaggctggtctcaaactcctaacctcaagtgatctgcccgcctcagcctcccaaagttctggggttacagacgtgagccactgcacccagcctggattctagagtaactcttgatgaaagaacatcatactaaggtgatttttatataaaacattaattcagtatatcaatcagtcactttaataaaaatgcccctcattatcctgaggtgaatagaagcctatgggattaatttgtgtaaatagatattagattaaaatgggaacttgccacataacaataatcagatagcataggcaatccaatctcagtgctgaatccagtattgtgtgtgtagttaccttttaaaaacagtaacatgtatttaacttggacttgcttcaagtaagcactgcatcaggcaagttggatttcaaataaaccttagcaattgaggggcattgtcgtactggaagtatatctcttcaaacaacagcaacaacagttttagatatttattttagagaaataaaggagacaatctgcaagagaaaaggcagaaagtgaggaggaggagagtacctagaatccaggtagagggtttatttctagaaaagcagcgccacctgctggtggacctgcatgtcaggcccttctgcggcttgcaggccatctgtcttgcaatctatgcataaatacacagcagtatttctcagctgctgttatacgtaagaattgtattaccagtaggcagatttctaacacactggttgtagtttaataatcctatattacctgaagtatgggttatataaaaacctagaatgttaattgttgacaaaccaattctaatatgtaaagcactgtaagtcacccagtaaatacacaagtaaatcaaaagggatagctctttttgctctaacaacgtgttattaaaagccacaacttaatcacttacataaaaataatgttcatgaatttcgatgtactaagaaatcaggaaaatgcattataatcttactaacagagcttttccttcacttacaatttagaggaaactattttgcagaaaatatttttccctttctttaaaaaatgtacctaaaccaacatgccatttaggaaatttgctcctataacaaaacctagttacaaacaactaagattacatctataaaatgttatatttttaaaatagcaatagagaagttgtggaaaatatgtcactgatacagtgagcagagaaacactacctgtcatttttcaggaaaagatcacacaaacgcgatagcaaaggaacacaataaaaagcagaaacaggaatgtgataggtgactctgattgcatctgcaaaggaaactgtgaaataaattaacacccaagtacccaagaaaggcacattgtggcttcactggaagtgatcattatgcaacagagaaggttggtgattttgtaagaacagaaataaagtgtagcctgtgaaatctagtggtgataactaatgaccatactacttacaactctgatttgatctctaacataaaaaaataaaataaaaaagtactctaaagaatagatgtatgcaatagggattgtgtttctcacttgaaacaaataaacctcaaatgggatcaaagggccccggtaaatgaaaaatgacagttcctatgttgccctgatttgatctcaagcaaaactaccatgctgataacatagcaggggatgtgaggaaggcagtggagttcttggattgctatgaaaaggaggcgagtgtgtagcccattcagctgatgggaagcccattctaattccaaaaagttattgagatttaatctctaacaacaacaacaacaacaaaataactcatgcggcaaccaaaagggtatcctttaaaaacacacatacacaattttgttatttccaatacattctgtagaatctctttacattcaattcttccatctgtctaagctgggtaaggcacatgtgtgaagagaaccaaatgtcacaatgcttgctttgagaacgaagtgtctccagttatccagacagggagcttgactaggagggtctcaggcataggccatgggcatcccatctcccatctcagctggctaccactcactctggagagacagggtttccaggagcaattctggacagatgcaaagggtgaaggggaatctggtggggttcagggctgtcaagattcgagttgggggcttaccctgcctagatataactcctagtgttagcttgtgtattagtccagtgagataaggtctaggccattggctagggtctgaacaattaaaggtgcacaccctgccttaaatatccaaatttatttgggataaattcaaatcaataaggaaacataggtggatgaacagaagcaatgggtttgccatggcttcctaccccgactcaaatacccaatgacatatggaaggagaaaacatcagcacccccagatccactacagagcccaccatgtgctgtcagcagaaacaacggaacaaatgtgttaccttcagaagaagcagtgatcaatttgagatcaatctattcaagagttgtccagcagtcaaaggaattggctgttggctgttcagaaacaaaggttctgttcaagaaggtataaaggaacaagaaggaagaaaggaagatctctagccttgagacttttttttttttttttgcctctggttcagcttctcatgaaagacctttttccttgagatacatgcttaataaactatggaaacatattgtcaacagagtttacatgttaatcagccatttattgaattcacactgtgtgtcttggttactgtgtgcaatatgctaagaattcaaagaccaattttgacttctacaaaaacctcaacataaaaactgtctaatggggtttacatgaaatgttacaggcttacagaaaagagattcactttttctaatttggtttccgggtgggctagttaagaaggcttcacagagatggcagtacttgagctgtaccttcacagcagaggttggccaactttttccctaaaaggccagatagtaaatattttgagctttctgggccataccctttttgttacaattactcagctttgcagttgtagcctgaaagcagccatggacactgagcaaatgaatgggagtgactatgttacaaggaaactttacttactacaatggatggcaggccagactgggcccatgggacagtgtgctgacccctgctctgaaggatgggtaagttttaatctgctagaagcagagaggaaaagaatcacagtctcaggaaaaggttccagaaatgtgtaaagtaatgagaataagacgcttctagagaattgttagatgatggatgcttatgtggagaacggaactagggaaactggttgaggccaaactgcaaaggctttgaatgccattttaatagcagaaagttggaaattatcctcttaaaaaacaaggaaccatcaaaaggtctctctctttaaaatgggataacatgacaaagtctgtgctttagaatactaaagttggtggtggtttggtggcaagaggaactaattgaaaggttgaagggcaacaatggcagactagctgaagaagaaatgagcatgtgagcttggcagtgccactggcaatggtgagaaaaggttcgaaatgtaatctggaggccaaatcagaggacttggccatcggtaggaggaaagagagagtgttacagggtaaaactcagaatttcaaatgtgcatattgatactcattccactcatccctagacctatccacacatcaggtctgctgaaagaaagggatagtggtaaggcatgggtgaaaaacttgggcccagtcttggccttgctccaagcactcatctaattaattacaaaatcaacaagaaacagagcccagctactcataaagcaaggtaggaaaggtgatgatgtgaagtctcaacaccaactggacctcaaagatatggccagacatggtggtgcacgcctgtagtcttggctacttgggaggctgaggtgagaggattgcttgaacctaaaagttcaaggctgcagtgaactatgatcacaccactgcactccagcctgggtgacagaaggaggtcccatctcaaaaaacaacaataacaacagaaaaagatgagttgagatcaagaccatcatcaaaaaagaaattttgatggaatttgaaaggacaggaatgtcttctttccccatctgttctcctctttttgtgttccaactttccctccctctcccaaaaacacattgaatttgctgacgatctccagacctattttagggatggacaagccataaagaaggggtttcagggggatgaggaatgatgagacctgaagtcacagttttctaatgatcccaggacctaaggattctaacagctgggctaaaatctaagacacacatttattttcatccatcaaatctgtactattccaactaggaagcctcttttgcctggagatggtgtccccgtttggccctatatgcttcctgctacacgatttcattcctggagacctggcaataacaaaacaaggtgtaacaaatatgatgaggaggctctttggggaggtcaacagttagcattcattgtgggagggcagggccatttgtagagacactgcatatgaactggtctgggatagcttcagtagctgacaatgttctgattactaataacccccaaatcactggagcatagataataccaggaccccgggttagggagagggcctttttctgtgctttccttgaggaaaataaaagacaccttggaagaaaacaagctgacaataaagtagaaacctgtaagaatcttctgggctctttcggtgtgtccctgtgcgcccagttcctgccctagaagctgcgaactcacagacagaagactaacactgatatactacgaggtttctacacacataattgttcctcacaggacctaccacgatgttgggtaatagacatcagcattttagaaggatttataacagtaaggattgaagcaaaaaggacttttagcctttctcaatcagaagaaggaagataatcagagtctcagagtttaaaggaaacttagaaatatgaccttccaatttcctcattttacacacaaattttgcaaggcctactggatagtcaagatggaaatcaatgttctggggagatatagctgtctcttggtatttttgttggcttatttctgttgggacaattattccatgacctagaaattaaacaaattgactccatttaacttttatagtctgttatactaagctgttcaactctcagccactatctgtgggcttctctgcctgtagctgatatgacctcttataaggctagcttgatgacagtcagtcatttgaaaaaaaaaaaagcactagttatggttaaagtggcttatcattattatttccatcaatactatgggagatggcaagcttctgatctagcagtccactcatccgctatgtgatcttggtcaagttcatctctgtttctttgttaatttcatatgttaatgaaggatgataaaaataataattcaacatataccaggcaatctttatatatattcactcactgaattcgtgcaaccactctgtgagataggtccttattatctccagtttatagatgaggaagctaaaaaatagtgaagttctggaacttactcaaagtcacatggtagtaggacatgatgtctatgctggggatgcctagatgaaatgagatgatgttggtgccttgagaagcacaaagactcaaacacacataagacattactcttattatagccatgagcatctacttggtgaacatgtcaaagcatgacttcaccaggacttacttccaaagtttccagaaaattcacagatctcacccttgtatctgcctgctctgacgtttcctagaatttcaggctgtaattgccaacaagatctctcagttcactgcacagtgaggggaatggcatcagaatcccctaacatagagaggaggaaatacaggagatgtctgcctgtttcccatcttcatcttaatagaagatgtttgtgaaggagcagtgtttccagcaaccagccccttgcaaatttcacattcatgccctaacttccagaccctgtgacatgacctgagccccttcctccctgtcttcattcctagcatagttgcagcttttattttcacctagcatctctcttctctgcaggtcattgtgcatcccttctcagtaacatctgtttagggctttggttttgaagcatccctgctggatatgttctctcagttggatacgttacaggccatatgtggaaatttactcatctgcactgaagaaatggccagatcagccttgacaaaatgcagagagcatttcagaaccattcaaaggtaagggaatgcttggtgcagcctgagagagctttgagaacaatcaggaaaactcttccttggcttgagcagaacaaacagaataatggctcctaataggtaatagctatgagacattcagcttttggatacctccacgcgggaggaatcatttgggtgctgctgttgcattcaagctgcctacctcgagtcagagtcaaattaccctgaccgccataaaaggcctcgaatgttgctctacatttgggcaggttgatgtgcccacctgcagatgctgacacctctctagctacaacagactcctttcctcacatgagccctgcccaatgcattggttttatgctgccctgactcacaccaaaataatcaggtttgctgaaattaataaaactgaatgtgaatgtcacaagtccttgattttccagagcaaatgctctatatgtggtagtaaccctgccactcctcattggaagcattggtggatttttgcctatgtggttttttctggtactttgtttccagatcttctttcccataatttatccttcacaaagaatatcaattgcacctgccatttgatcattttctagttccttcagtcatgtccttgttctttcttactacatttttccctcttactcttcttgtacatcccagttttttatgtttacatatatatactatatagtaagttgctgcttagaaagttttgggaagcttcatggatctagggcgatctggcttctagcacatcaccaattcctttaagggttgggaagcccttcatttattcattcttttactcatgaaatatttactgaactggaatccttcaggccatttcctattcaagtactcttgccaatataggaagcccagccaaggatgtcagcatgctacatttttgaccttggagggagggaaggcagcccctgggtcctttcttgactgagtgtgatccaacaggctccagcccagaaagctgacattggccaaaatgaagatcattttaatgcaagcagtcagctcccttcccagaagatagcccatgctctatggtgtgcagatgcccatctatgcactgtcgatacagctggtgcagtgccagctctagggctggagtctttctcacttcatttataagtctctcagtgcagtcgatcatccctaatgcagatctgcctcaaaagattccattttctatttgcatagggttttctctgcagctctaggaacatttggtgggactcatcttgcggtattgaaggggctagaatgaaaactttcagatttactagaaaaggctgggggagttttttcttgctgtttcccttgaatatgagagattagctccccctgaggatgaccaaatgagatggtctgagaagaaaggccacttttgttagtcctgctcatctgagctggacatcaaaagaatgtctcctcagaataaaaatctgtgggcatgtgtagcaatctccctccaaagcaggcactatctagctatttacagaaaggcctttgcaattccctctgagatttcaaatgcaagggtctgacaatgctggatttagctctgtccatttagattccctttgggaaaaaggtcagctggggaagcagaacccctgtaagcagatgtggcgatggagggtcccctgactatccaggtaattcaacaagctggtttgggagaaagccccagagagagaaggacaacacacagctggttggcttggtgcattttgccacattgcacttccagaagttggcattctcagcatgcacagcctaccaccatgagggaacccaggactcaagtgcttttccatgcagttttaatgaccccctgaggtcaatggtgtacacaaatgccacaatcacggatgctgacataagtaaggacacagacaaaggtcttatgcacaaagcagtaaaaccgaaaagaaaattgtgcatgatacttagaaatgccacatgacttctttaggactctgtgtggcagtacttcacaggaaatgtgttttgtatttccactcgagaaggttaagtgtttgaaaactacagtggattttcagtgaatgggatgtgaagcactttattattttccccccatcgatgtaaggagacatgctgacttcctgagaaaggaggagaaaagtctccttgccatatacagggatttaaagaataattcccatgagctctaactgaagctaccacctgcagctggaagcaagagcctcagcgctggccagctgtccccactggtggctcccacttgctttgtgtctgctgctcagcctgagccaatacttcacaccagcaggtgagagctgcctgcctgtcaccttcaacacactcaagatgtaagatatatttgaactggggaagatgatgaggaataaggaagaaataatggttaggaaaaggaaacagaagcagtagatccccaaggccagtggtagtggatgcagccgagtgggtctcctagtcctgggtcaggggtcaggaaatcttcctccaataagaaggaaactctagcaaacccagctaggaatcacaatggctgccaggtcagctggggagaattaggctcatggaattcagctgctccagagccactaattaaactgtcttttaaagactgtaacttcttggatttgcatctgggcaatgtgcttcacctgcagggtcctgcagactatagatcaagtcttccttctgaaggcttctcagaacagctggggcccgcccacaacaggctcccctctgtttgtctcctccccgagaggggggcttccagctcccctctagtcagtcccttcctcccctgcagccacagcagccctcccaaaacaaagcctctgttaggtcacttccctgatcaaacaccaatatgatagtgtcgcactgtctaaagactttctatcatattacagactaagaacaaaacccttggcctggcccctgccaggaatggggccccattttacccttcaggggggtcaattccctgcatgctaagtaagtcttaaactctagccaaattgggtggccagctgctgtgcaggaggcccccccaggactctctacattatctcgaggtttcattaccagaatcctcacttttttctcctcccttggagattaagtgacttatccatcatattcaactgcaagagtaactgagcaactcaaccgactccacactctgtggagccacacggcctgtgttgaaatcccagctccaccagtcactggctatgagacccttggcaagtcatgagactgtgacatgaggctatgagacccttggccagactcactggctatgagacccttgtgccttagttgccttatctgtaaatggggcacattgcagatgtctcaggttatagttgcctcaactgcaaacagcagttaccacataataagggttaaattaattaatatttgtggtaatagggggagtagtgcctgtaatgcagcaaatgctatataagtgttaaatttaacaacagcaacaacacatacacacatcctccctgtgtactcagagttgcttgcacacagtaagagtagagactacactaattctagtcgtaacatgaatccaagttaaccaactagccatttcttagtaatgctgtgtcaacaagtctcactcccttggtgatgcagtatacacagaatatagatctctttggggagtgaccccatgctcagataagactaaaacatgatgctagcctcaaaagagaaacataatttttcagcaaatgttggtagtatgcctccctctgtctctcctcaccaatgagcatgacctgcttatgattactaggtccactccattctggtttccatttttggctgctctgtgcttgcagcttctaggcttcactgggagtcaaagatcccaaatgttaagatcgttttgaagagcatgctggcaaatgtcctaaatgtgctgggccagatgacaagcatccatctccgatgaaggaagtatccaactgaaatgatgggcaccatatgagaaggagaatcccaaggcatgatggaaaccacaggtgctgcagacccactgtccgtttctgtctggatggggaaggaaggcaggatgcagtgaagcctgtgccactgccccacaagcctctctcgagtgacttcacaccattattggtctgatactaatttgagacaatacccaatcacatcacaacaaattagccacagacacgtgatagcaatcaactcagggggcgatcctgaatgcgggctgggggattctccagctccgtgagccgcacgctcccacagatgtttctaaaagcgtcttcccagaggcccatttagagagaaattaaatgcaacttcgacttaattaacgttttaaatgataatgaatacaatgtagattcataggaggcatttacattgtgttgtaaaattgataaaaatttaataactctttgttaataagttatgtctccccagacccataaagcctaaggcgctgcaaactccacactgggtctaatcgaggctcctggtgcaggtggaggaaagaggcagagacggacttgacatttgctccaagcctgctctaattcaaacctctgcttgttcatcagtactttatttcatacagtaaaggtcaggatttgggctcaaggcagagccttgacaagaaagctcaagtggaaggcgggctggccctggcatctgtcgcctgagatagtggaggaggatggaagatgaggagctaactggccacatctgccctccaccatggaggtaagaggaagcattcactgcctggtggtagaagctgtcaggatgagtatcctgagaaccggccactgtcctgaaataaaaaagcaaacataatttctatgtcaccttgcataagggcctcttctgggcttacatgaggcatgccaacatcttttctagtttgtccttaaagagccgagtcatttattacagcatggtgtccctgggaagaaaggtgtcccatgatggggtatacacaaaggaccctgtcagcttccctcattctgacctttctccttcttgtttcccaatcctgtttcaaagaatttcttttgagaagttggctgccttttgcctactgttcccgtctcctttcatctacctgcagtacatcttcatagtgtattcatcttcaggaattcaaccatactctttttttggaaggtggtgaaagcacaacaaggtccccaaatacaagccagtgactttacctgacactcaactgaaacaaccagctatttattctggagaagaacccagtgtgttgggagctcttgacagatgagcgatgtaaaggatccttctcaaaggcaattttgcccaagcatgatttctgccttacaatgctgatttaagaagctgcccactgcacagagtgagctaaggcccacagtaaggcatatttccagtcaacctatggctcagcgtggctatcacaaaatcaagcaagaggcagtggcttctgtagcctcacctgctaccaataagagtgtcttaagaagccccttccaggcccatcactaggtcttagtcacaggggatgacccagtggctgcctaggccgatctgccactctgtttttacttcctgcaatgaagtacaaagggtcaaatcaagacgcatgggccagggtaactaaagagccaggggacaacccaaaggctctggtagtgtttggtgtgcacatgtgtgatggatattgacacagagagagagagagagcgcactcacatcagcacggcaagcatgggaagatgggagaaaatggagactcagacgaacaggctttaaaactaatacatgaaaaactatgatcacatcgattcgtgcttattatccttggctctcctttttctgtctttttctcactggtagtggtggtggaaagaggggagtaattgattttagggcccagaagtaaaataagcaaatagaatttaggtttggggaatttgaggaagtcacctaaaactgcacataaaaggaatgagataattataggctgttgatttttaaatgtagcttattaaattaactctcctttaacaggcgttggagactgtcaggatagggtgtgtcctattatagacattttcctagagctgtttccaccccctgcccttgtatctgattttatgtacttcaaaatgccattagttcacttaagtgactttagttctattgacaatgttaattctctgtctgcacaaaccaaaggctactcaggataagctgatttttgtttattatctgacaagactcgatattacactaaactgattttggtacgtctcccttcaacctaatcatattggacttctctcagcttaaccatcggagttgaatgccttcttgtattatatttatacccaaaataaaagtcatgtgtaatttaaaattagctacagtagtttgcaaaaggctgcatgtaattgtgcaggtttaaacaattagtaaattgaaaggttggtgtgagcaatcacacatgtactttagctaaagctggttccaagtgcaagtctaaaggtctgcttctcttctaccacaggattaatttgtttgtgccagagttactgatgctttgtgactagaatcatgtcaggcaggtctcagcaggtctgaatcagtatggccctacgttgccactgcatcataattttaattgtccctttctattacatttagcaatcagatagcaggcaagactgaaataacaagaataaacttctaaagagagagaaaggtccattttacaaaattatagtgggaagaaatcgtactgattggaatctacttctatatttatgtgcatgtgtatgttgctagacattcattttttacatttaatagtactagaacacagctacttgtgaaaaagccgaggcccataccatcctgatgtcttttgagagagctgggactcttgcccaggaccatctgaagtggaaacaaaaccaagatgatcataaaatgacactctatgcactgattctagcctaccatattgaacatttcagtcttgccagaaataaaatccttttgtgatgaatccttatcggtcacaatttgccttacttttctgacaccttttattttgatttttgtctttcctaaactagtccttcccctctgaagttcttttggtcaacacagtctggccttccatctcctcctgagttcaacagaagacaactatcataatagcacatgactcaaccgatccacagtaatgggccacacctccatagaggggtgcaccgagcaggcagcccctgttgttagaaggcaggttttcagaactgtgtgagcacttttaatatattaccattcctctgggaaccagctacttctcttcccacttcacaaaacacataatgggactttgtgtttcaatttaacatcccttgaaaacggaaatttttccccttataagaaaaaaaatagagtaaagagggaaacgaaaggaaagagagaaatgaattaggcagtctccaaagcacactggctcaactgggaaactgcgaccaaagcaagctccataatagtataatgacctttaatgagtgtcttgggaaacaatacagccctagcataaaagacaaagggcaaaactcatcatggctctgctgacactaattcaaaatgattttcagaacaactaaagaatgtaagagaagtaatctgatccgcccatctgacctcactttgattcaagggcccttctcctgccatttctaattgtcaaaccctctacatttcacatctgttcatatttaatgaaaagcccactctcaccactgctcttgagtcaacttgctctgtcaaatgggcaccacccaactccaccaccagcgagggatgcctggggattgctattggagcactgccagtggaatttcacatagagacagacatttttataattggagaagaagggcttatgcaggcccaaaaaggggctcaaattggaatggatttttctaacttattattaatggtcaaaggtgagtggtctcacacagggatggatgaaatctgcttttgtttgatggagtgatgacggcaggacgactgatgaaacggagaaggcaaatcgccccctgagctgtcaataccagttaaggcttcaacacgcagcccaaagctccacgtgttccctggtgggggctgattttggaggcaagggagggacaacatgccactcacagaatgtttcttagagaatgggacaatcccaccccaaggttttcttctccctggtctccatcaatggttggattaaattgcacagctgagaaatccctctaattaagatttctcttggatataatggaaattacacacactgggcaccatggggtctacatgggggacacagagtgtgctgtgattggtattgttggccagtgccaagacatgaccaaggggccctagctcagagccagagtggctcctttcttttctccactgagtctaggctaaggttttagagcctcatgattatttgagaacagaagttgtgcattaggcagaagagtaacccgggggcttgtggttactttcaccaccatcagtcaaagagatgtgaccaattcatgccacctcaggccctcctctgctcttcctccccagcacctatctttgaacttggtgtcttgctgcacatcgtagacagacaagttctctgtgcagctgtgccctagcttatctctgtaatggcatgcaaactacagataactcttcaggggaaaataaagtgataaggattcatatggtagcatctaaggattgtaacagaaatctttccaagattttaggcccatatggcagtccacactccctctcaatgcaacctccattaggtattactttgaagtgaatcctgtcccttggcactgctctggagcagcaggaaatcgtgaatcagagagaatgactctctggtcctagatcaaagttttccaaatgcctctaatatggctcgatgcacaaatcatgctttgcacttgaactttgggcccaaacataagcacctggcatggcacacagtgaagtcccggttccctgagccctagaggcctcatggatcccggctacacagccgcactctgctgggaccagcctcaacaccagcacaggggagtcaagccagttcattttccatgggaataaatgcttaagagctcagtgatcttcttcctcctgtcgtcagtgtacacctacccctgctaggaaagtgtagctcaaccagctctgagcacttggaaggtgagaggacagggagcaagaggttagcaatatatgtgttggctgctttaaagaggaagggaggaagtgcagaaacgagaaccatctcctaccttctatgctaccaaaacatgaaaacaaagttatagttatacttcaagtaaagtcctccagtggaaccacagccttttctgcacttggaccaagacccacagtcccagggtctcaaactggagctttcaggaacttcacttatgaaccgtatcaggaaaacagcaaagtccatggggaagcaaggataagggaggtctcaggaaactggcacatctcagccttgccagctaccagctgcatagccttgacaggttctttaacatctctgagcttgtggatgacaaagaagactgacatcagaggcctgtgctatggactcagggatatcacagaggtttctgacttaaattttttgttggcatttggaatcacaattgctgcaagataccttagttaaacaggggctatactattggaaaaataaaagatattaatggaacagtccttcaaaatagtcatcattctgagaaaaagctctgtaatccactagcccagtgcaggctgacagacatagaaaactcgtttccagaacaaaagacaaaatctggcactggaggaatgaggcacaggttagagagacatagtaaaaagaaaatatatatatatatatatatatatatatatatatatatatatatccatctgcatcaaaactctgttgtattttggaaactatctaagaaactatctaagctcactaaaagcaattcaatgctagagctggcttgttctcgctacaccctttccttcctccctttgatacaattcaatttacagccatttcaaaaatattaacatgtacacttctgcatatctctgtattaatacagtaggtgatatgctgtcactttaatttccatttatatttatttaaaggagagagaggaaagatatcaccagactgtaatatcacagtcctgcatgctgttacgagaagcgtaagttaagaaaatcagaagggaggccttcctaggcacgtacacagagacataggcagctggggcaacatgtcagcacacaggagttcacactgggaagaagacatcagcccgactgactcagaaccacagggcacagcacaagacagggatgataccacagacagcacaaacatggaactacgtgtgttgaggttaaacttacaggcacggaaactggtggagcaatcattaacagagacagaagaaagtgggaaggctctctcaagggtgtccacgttaccacgcacacggcctgacatgcatgagcagtcacgctcagaacgtccgcaatcaaaacaacatgcccgtctcattctcttgtagatggacatcttggctataaccgtgtggttggatgggaggagaggaagagcggcaattaatggcaaggtcacacacagcaaggcagctggaagggagctgaagggatttaacacaggtcttagttcactttaacagtcttgacccagaaaaaaatgcagagtgattgttggtaacagtttggttgtacatcaaaaaagcagcgaaaatataaattgcctttatcgtctcccaaggctgttgcacatgatttttctcccctaggtaaagcggtgaccacaggaaaagggcatggctgaatacactcgggttctcaaatgggaagaagagcaaattatcgacagcaaaaaacgtaaccaacacttttcccctgatatgattaatacaggaggacaaaatatacacactgccaatcaatgaaattagctgcttatttggtataataaatggtttttgcaagatgcaaaaatatctaatatgtaggctttctaatttccatccatttctgggcattaggcagaggctgggacaagctttcatcaaattagatgtgaaacgattacgtgttaatacagtatctaaggatgcctttgctgaacttcccgagagtgagtttatatgatggctacaggaatttaaatttactcttgacagaacaaatatccaaatctgtccatataagaaatgcagctactcaagactaacgctgcagatttgacattaaaggcagttcacaaataagaaatcaccaaaagcatatgagatgttgctctattggaatgcatttagctactcatgggtgtattttctgcttaaagctgagaggatctgaaaatcgcatctgcctttctctccccaccaaatagaaattcaggaagcaatcaggctattggttaatcatattatttcttttttccttatacagaaaatattcgccaaaatcgattaaaactgacaaaacatgaaatagaagaataggttccacgtgaaatatcttaatgcaatttgcatgcagcattgatagctcttctaaagctggtatggtaggttctgcactgcctggggatccaaactgagtggtaacctataaaagttgttggaagtcagcatcgtagtttccaatgcccttcacctttgcctttcaagccaatttatatttcagtacaagagaaggtttttgtacctcattttgatgctacaacaggcaaacatgtttgcttatcacttatcatgaactggcctgcttctctcacgaggtgggagaagaattcacatttattctaagcattactgccaaatggtaaacctaaactgaggaggtgttattccctgcacccacaccttccattttgaaagtcatttcccccactctttctttttctttgtagagaatggttgcactcttattttaaaatatggcttgtggttttgccctctttgaatgttacagtcaccaggaagaggggtttaaatctctcaaatgggtcaagtcctgttctaagacctttatgacttgccatacagtatatttgtcaagcaagggtaacgttatgattgtgaagaacaggcactgggggagatgaatgagagatctcttcagcagcaactccattcttgtaaacttggctcacatttttagtgacgtgttcttttagtgtcctagctagtctgttgttcagatcatcatgcagccccagccctgttcaatggtggtatatcattcctttgagctttagcttttaccaaaaaaaaataaaaaataaaaaagttccactatagcatttgaatcagaggaatttagaaggcatggtgtgaatgcccagacatcccaaacaaacagcaacggctgaagtcaagaaagggaaaaaagtcttcaattaaagacatgaacataaatttatcttaaatgcatccggatctggcatacaatctgcagacattcccttgttttctctttcttatttcttttactggaaatattgatttgttatttacacagaagagggaaacaaggatgatttttttgcttcaccgtagataaatcattttgaaaaacaatttttttaatcaaatgctgtagcagaagagaagcccatcaaactctggaatgctatgcttctcattagcaacggtccctggttttcatttccatactgccattttgggtttatgtacaataatagaatctgacacatttgtggagaaagaaagttcttataaatataccgtctttaaggataaggggagggatgatggggatgaaataacttttgaaactatttgttcagaggcaaacagatcagaatgggtgatgtaaacctcctccttgatatgagttcaggaggaaacacagtgacaaaccagtggctctcagggactgtttgcaactgttattgttagccgttctggcgaccatgcattgttctaaaatttcttattgttagcatgcaggaacaggctgaaactggtaatcgaagcagcaaaaaaccatgtgctataagaagattaactgttaattataagcagtcacattccaaagcagcatatgcataaaaaagaaaacatgctattacttgtcattccttcccaatcatttttacactcacaccaaatgcaaaatagaaatctcaaaagacaaacaagtgccaccacacacacacacacacacacacacacacacacacacacaaaatcagcaagaacgatcaatgagaggctcaaagacaagacagaaacagttaaaaactattgagccccacatgttgacaaaccttcatgaatcagaatgtctagatcaaggtgccaccaactgggaaggtggctctttttcgctactgctggcatagtccatttccattgactccctgtcaggtatcttcacctagagacttctgggtccactttcttaaaaggtaagacctcccatctggtggagcgattcatcaggcttgaaggatatgagtactggccaggaagagctctcctctgggccattatacaaatcatgaacaaactctttaactaaaagctgatgaggagttgtctccctggtggtagatgttccagaagaattgaacactctctgtgtaaaattatactcttaagttgtaaaattaaattatatcaaagttaagtcatggacctcctaatttggaaattaccacccctcatctctctcaactctctctggcttcctaacccttcaattttgttacagtgaatcatggatattcagaaccactggtgttttgtttccatttctcagtgactgtttccttttctagagctgatttaggttagaaggttaattttagatatgaagagttccactttaaattcccaaggttaggtctcaaagtgcaactttgaaaatttcaggatttatttcaaacagaagtaagtttcttatctactccctggccacacaaagcatcctctctcctttggtgtttgctaattttctttcttacgtagtcacccattgttcccttcccaaatcccaattctcagacaaggttttccccaggatgtcaatggtaatacaaagtagatctatgaggacatctagtggatcaatgtggaagagcagctagttcatgggcagttggaactagcctttctccaaaaggagcagaaagaggaccctgctgtctctgagaattgaaatatatgcagtgtcatttcaattcaatggcttctcatgatccacagcagatgattaggggtaggggcagtgaaagggtgagaggtcctaggagatgagcctagggtctgcagccacagctggcacaggaggactatttcagtggcagctgactgcgtctcctttttaaagccctgctgcagcttcctgagactgggagcagacaagagtgtgtctctggcaagtgtgaacaccaaagctacttgtcattccatcttagggctcttgaaacttcatgctcaattaactgccccgataggccaacttaactctaggaaagcagaaatacaaggctctagggactcagtttaccctctggttcacatcataaggttcttgttattggaccagggccatggattctatgaggttatgtggttgctaagaatttgaccctgagtctcaccttcctccgaagacctaggtcctggcagtttcacaatttgagaaaaagcttttatgtgcttttcttcaccacagtgaagtggatattcaaccaacatttccatcataacttcatagtactatttacagagacaaaatagaagtatttccctaatggacatcatcaaaactatttgtttactcttgagtgtttaaaacaaaaaggcttctcagaagtgttcttggacaacttttcctctattctcaaaggccatgatcatgagaccagaaacctgttggaaagtggctggtgaagatgcagctcagttactgctctttccttgagtcaaatggataatcagctgtcaaactcaggttctctgctggctggcctttctgagccaagcctggaatggaaggaagaattggattccatcctatcctcagcaccatctgccacctgcatcagcaaccaaattgtcagccaatttccaatgcagaatcttaatttccagggtggattggaagaggcaggaaaaagcagtactggactgaggggcccaggtggagttttccaactgctggggaaaatgttttagatttcaaatggagcaaattcaagggaagactgggatggaagaaaaaaaacatctgccattcaatcaatagatacttttcaggtcacagcctcacttttaaaatcagtcaaatgaaggagggattatttccaagcaagaaacatggagctactcttcatgggctctgcagcaactaacgttactaataaaaatatccacggaagaaaaagtccaccaggatttaaggtgaggcctttgatgtggcactgggaatcagagaatattctttcaagtcctataaatgagaaatgatgtcttcacttagcaaaattcctcccattaccttctggagtaagaagaaaggtcttccaggtggttttccaaaaacagaggagaaagaaaaagctagttaatgtcagcagcacagagcacactgagctagttgattctgcccctaatgactgtattgtggctgaggaaggcagaagtatttggcactagagttgttggttgattgacaccacattttctctccaattctgaaggaccattcaatttagtatgcagctctgcaggtatgaaagtgggccatgccctcaagccatgtttaaagggttctgtcgatgaagaaagccacagagtcgattttggcaagactgtgcattgaattgaagaaggtcatcattgtgttttgtttttaaagtgagcaatctataccctccaaacactgatgactaaccaaaatcagatgatcaacttgcctcttttgctgcaaaggaatgaggggactgaatttgaaacatcttctccaaattccagagccattggactgaactgttccacagattgggtctccttttcagtagagccttacaaacatgaataaagacccaaagctcaatgctggccttaaaagctcctcctcaatggccacatcttgttgagtaaaagggcatcctattccttgagtaagttagaggttcagacacttgtattgacttgttcagacttatacattgctcattgctgaaatggaatgttctcctccagtcagcttttctgccttaaacaggtaaagggatcttccaagatgtctgactaacattcataaagcaactgggtgtgtcctactgagtactgactaaaagaaaaactttgttgtaaagcaagggaacttcatagactgcagataataattaccactgtgcaaatacttgtctccagtaagacaattgagatacttacagtcccaaagttgagtaaccaattaattatctagcaagcacttctcatacagagaagcatgtactgcaataaatacatcactctatggaatatctctactcttatatgtaaaaatatgaatttttacatataagaatgtacatatactctgatacatcatggtacatattgtgtgtgtgtatatatatatatatatatatatgtatcacaacatgggaatatatatgtggcatatgtgtttcctttaggagaggaatccaagctcaataacaaaggagaccaagtataatttatcaaaggcaagcatgacaattaccccagctgatgaagcatctggagttatagtggtaattacttcagcctaatcagtgtcccttaaaagtcctgagacaaggccttcaagagaaacacactgttgtcaaggtcttattttcaaatagaaaaataagacagtgcccgaagctggccagagcccggggactggggtggatggatggagagcaggctccctggggactctctggctccaggctactctgtagactgcattgggggatgaaggagttggggcatgatgtcactgctacatgcaacataaataccaaaagtaaaagggaaactaaaactgtacagaaaattaaaagagtatctcttctagagaaagacagggggaactggactccgggctgctgggaacccgttttactcacaatatatcactaccagtgtgcagttaaaatagagtaggggccgtattccaaggcagcaaagagaaaaaaaataaatcaaagatatgtcaatgatttgaagtcaaagaaaattccttcaaacacatcaaactagacattacttgtccactaggagtccacactttggcaaacttttagagtctgggggaagaaatgtaaatcattagacaaggtttgttatatagaaaaagaaaatgagtaaatagtagaccctgagaacttgctcctcggccagacagctgaatttgactcttttccttgatagagagctatgaagaaatggaaagaaatgcaaacgttaaactatactatcacaggatttccagaaatggaatgtccgcacctgatatttctccggatgagatgacgtgaaatgttgaaggttactgaatgaaagtgaatgaggagctaggggtggaagtgaaaggggaaggctgggttggggaaggagggttaggaagctatgggtaagggccagtgactgtcatgagctctgccctcatgggatctaccattccagggtgaattattaatacctggactaacacgtttggacagatgagtatgtgggtcagctgtcttctccaacttagagagggaaccaagcaatgtctgttcgaaggcatgggggtccccccagtgtgttactaataatcctagtttcttctaattaaagtttctttgcaactaaaacatcttctccaatttcctcacttgcctgacctacatggggaggtttatttttaataattcattttattctaaccaccccctcacctcacacacacatctgcatcctgccctctgttctatggccttttaattagtaggagcaatattcagacaattctgattgttacatagccaaaggcctttgtgagatgaagaagctgaggttgggggaggaggcacagggatgtacagagaaggaagcgaggcccttgttacactggcttggctttgtagaggcaggccttttgcagcaattggtgcagtgcataatgggagattatatacctcactagctccaccaactttaaaggaaatgaagagaagaaaattatttcaaacaattatgggcctctctctccaggatgaagctaaagcctgctgctgtttacctgtctggaaccaaggtggaaaaataccctagaggccaaatccttatttcttatttctagggacaatttagtctgctgtgttccactatggcgtcctatgagggacattccaatgtcagagcaagagtcagagaagttctcacttcatccttccacttccactccttcctcccgagaatgctctccatccagacaccagggacatcttttaaactaagaactaatgatgacatttcctcacttaaaatcttccaaaggcttcctaatataggactaaaacccacacttcttaccacgtcccctgtctccgtctctaatctcatctcatactaccctttccccagtgccactggcctttcttccatccttcaaacaccacaaacttattcctgcctcctgaccttgacctttgctcgtctccctatctggattgggtcttggcctcaacatcacccctgactgaggccttcctgaccttccaagctataaagtagcaccactgcaggattcctcaaccctcaggcagtctcttctctcttcttagcactggctatctctgaatttatttatttacatcatcatggtttgtctccattcaccagagtaaaggattcaggagggcagggactttaccttgttgaccactccatccctgaaaccaaaaatagcagctcatccaaagaagatactcaaaaatatgtgaacggctaatcaatatgtgaatcacagtcttgctatttccttgatactctgtgggatgagggtctggcaaatatcctgtcaggggttattggcctcacctttcctccctttcccaacccctcactacaagcgtttctttacagaagtgttcacctcttgtatttgttgttctctcttatttccctcaaccctcagactgctgtgctccttctgattgaaatgattcaggagatgtctggtcaactcatccgtgctgctgtgtccacaaccaactaagcatggctgggatggactgcctggtgaagaaggtctttggattcatggggtctgtgggggttgaatggggagtgaggttcattctaggccttgttctctcttagatgctcttctcggtaggttgtcagaatcggggaattcttgtcccaagaaattagaggctcttgttttgagatatcaataaatactcatctcgataagagtctgggggaaggggaccagctgtattaagtcagtggaaacagggggaggaaacccatggtcctaagctgccccaccctgaggggatttctgcagaaacttctctagaccaagagtgcaccccaagggaattttccccatgggttgaggaacttctttaccctccagcagagtgatatttatagatgactggttctacattttctgtaccccactctaggagtacaatgaaaaaggtccttccttcagtggcatactttaggaatggtgctcttctgtctggcttctgcttgtgaacaaggattttatggggtactctttcataattgttcttactcatcagacccaagactgcccacattgcctttcccttctgcaaaaaaatgttagagcacccagagaatcaatagaggccttcaggtgtgcccaaatccctgtatgttggctgtgtgactgtcagcaatctcatcctctcaaacttggaagcttagtttcctctttttgtaaaatgggattaataacacccctgccaattacatggggttagggtgagaatcaaagcaatgattataaggagcttttaaaagactaactcaccataggaaggatggcatcattttttgtttgtttttcaagggttgagaacaatttctattaggcaatacagcataattactgcaaaaggcacaaccttctcaaagcaaagaccacttaagtcatggtatctcaggagctcacaattccacgttctggactcactatatctttctcaagaggccccagtggcaaactgctttagaagggacttgagacagaatatgccagaaacaactgagcccagtctagtctaccccaaagagcgatgatgcttgaggtcgacctttggacgatggcaactgaagccctttggcagtggaaagttcttttcttgggggcagtctgaaggtatcacagttgccaactctggcctgtggtattaaaactagcaggaattccaaatggaaagagtcaactcccattttggagaccaagtcctcagatttagtttctctctcaaccctatatactcagggacccccaatccactggaaatcacgatacaaaaacactttgtgctctgtggctttagttctcctccttattatacatcatacttgtctctgttagactggacacatctactgaggcacctctagagtaaagaagcagggactaggcacaggtttcattcctaggtgttgatggtggtgatttttcatcctctgctctaacaaagcaaggacaggtatttatttcatatttctttaaactgctgggtgaaacataaacatactcaagaaaactctcgatgtttagtgtttctctaataagaaaagggaaggaaaaggaatttggggaataggaatgagaaagggaggggacagggagagaaacactacttacgccgtttgcagccacatttttttattcttttgggatctgtgatgtcatcatgacaggccttgcagtaaaaaaatgccctggagaaagagaatggaaaaactgacacgtttcataatccacccaaatgaaatgagtaccacatttcctccacggtggtgccaaattaatgaaacacgccagcattaatttcctttaatcttttgaaaggtttagacatttgcagacggaaatgtttgttgcaagaccatttatttcaaacacaggattctgtgatttgagttagtgctccttttcataaacttccatttacaaagaaactgggaaaaaagttgctgatgtgacacactgtgtctgctcattcgtctttcatttttgagaacagcctttgatgctactcgtggggacatgtgggcaatgagccctgggcccttggtggggaagttaaatacaacaccaaaattcccacagtctggtcaaatatatatttgagggggcagaagtatgtcgtttctcagtcaaataaaaatatcaagcttgtcactctgaaagcaccttttctgggcagccaaagggagacagagttgaggaggtctgcagagagggaaaaacgaaagccacgagtcagtgggttcctctgtcaaaccccctctggagtttcacagcttattttactccaaagctgactggaccaattcccatgctatccagccctgagaacatgcactaaatgatggttttcttctcactatggagcaaagctcagctgaccactggaagggggtgagtagagcttattgaagcaataggtaggtagaaggagaatgagatgaagcactcaaaaagaaaatcccctaatctgacttgaatgtccataggtgattccacagtgcattagctgtgtcaaagatattctggataagaaaaataagatcattcaagcactatttgaaatcacagtgcctagaacagcacaagaggcctgtgccctttcagtactggggaggtgataaaattcactggaacaaccctacaaccttctggatccaagaactaacaaaatccctggcttgttgcctttaccactcccaacaggaaactgaatgccagctatgaacatggccttttcttgaccagggctgcagaaataaacacaattcttgaccatttgattcttaggttcctttttatgttttcacaggacttgatttataattggcactcattggaaaccaatgttaagacttttggatccacacgaggtcttggagatcctgcagcctaaatctctgggactcagtgtcctcatctgtaaactgaggaggttgtcgtggactgcccagtcattccatgctgggattcagccagccccaggacttctgaatccaagtccaatgcttgctctatcctagcaaattctccactctttctttaaatgccagctgtcatctatgtctcaaaaaaattaaaaaaaaaataaaaagaaatcctagctgactgttgaccctgagtggcaatgtggctaagaacccaatcaatctgccttggcacaggaagaacaggaaagtagaaagcatccaagttggggaaagtaactctgcgtccacttcctttggccattttccctccccctttgttgctcttaacacataatgataataacggtaacaatcatatagctaacatctatagagaacagactacatgtcaggtgtggttctaagtattttataagcattaaacatatttgatcctcaaacaaccctttgaaggaggtatgattattatttctattttacagataaggaaactgaagcacagagaagttaagtgacctgcccaaggccacacagctaaaagtaccaaagctgagattgaattcacatagcctggcaccagagcccaaggtctatactaaagagatgatgacatgataataagcctgaatagacttgtgaaaagataaagtttgattacttcatgaactaaagttggattcttttttaatttaatttttatttttaattgacaaataataattgtattatatgtgtggtatgcaacacattgaaatacatatacaatgtggaatagttgaatcaagctaattaacatatacattatacagataaagaaactgaagcacaccttttgtggtacgaacacttaaaatctactgtcttggctgggtgtggcggctgacgcctgtaatccaacactttgggaggctgatgtggatagatcacgaggccaggagtttgagaccagcctggccaacatggtgaaaccctgtctctactaaaaataaaaaaattagccagtcatggtggcatgcacctgtaatcccagctccttgggaggctgaggcaggagaatcgcttgaatccaggaggtggaggttgcagtgagccgagattgtgccactgcactccagcctgggagcctgggcaatagagcaagacattgtctcaaaaaaaaaaaaaaaaaaatctgtctttgcaattttctggtatataattcatttttaactatagtcaccacattgaacaatagatttcttgaacttattccacctgtctaactgaaatttcatgttttagatggacatctccccaatccctcccaaccccagcccctgttaaccaccattccactttctgcttctatgagtttaacttttgtaggttccacatgtaaataagaacatgcgatgtttgcctggcttatttcactaagcataatgtcctccaaggctaggcaattaaggttaataagtgaaatgaggcaagggtcgggggtgtccatggtgatctggagcaggcagagtatctaagctcagctgacctctgccaagtggcatttctttgcaagaatcattctcttccccacccatctttgcctctgtcatgctcacctcgcaaagcccctcccttactgcacacctgcacctgagcaacggagtttcgctgggaaagaaaacatgctgacctcactttaaacccacaaccatggatttcaggggccttttccactctttgggatctaccccattctcctgttgcttgctttctcacactccaaaacagctctctctcctctcctctccacttgctccagctcaccgtacccctcccacaagcagccttcagctggtgatcttgcttcacccatcatcagaccagctttgtgtcctgcaaggctggcctgtatggtctccttgtcctctggtttcctggcctgcgtgtccagtggaaggagtcagcaggagactagggtgaggggggatgaggtcaccaccttgaccccccgggtgccctcctgtacaggtctatgaaatggcacacgacagcctctctctccagctcctgatagccctccttccccttgaccccacagatctagggtgaaggtggcttcccctttcttgctagctctgcagtgcttggccatcccttgttggttttcctttactatttgcccataactttacagtctcttcataaaactctcctcctttttcccatttaagtttgtcatctgtttcttgccaggacaagaaacagcacccacatttacatattcatctccaattcacacttatccccagaactccagactctaagatccaaccgccttatgatatcactgtgtgtatgtttagtacacatctcctacctaacatagcccagatagaatgcttaacttcctactacccaaaacttgctccttctctagtatccctcatcttggttaagatcaacacaatctaagccctgactctagccttcatccttcattcctcttttttcctcacttctgcccaattcattggggggttctgcacactctcccaaatacagtctgaatgggaacccacctctctccacctccactcaggggtcagtccaagctgccatcatctctcacctaaactatgcaataggcgctgagtctctcacctcttctcctgccccattcctctcattctctacaatgcaggaagaatgaccttttcaaaatatacatcagatcagcttaaagccatcaatgacttccattttataacagatccaacctttctataaagtgctttaggagccagcctctgcctctctctaacctcatctcataccactctccccaaatctattccctagccgcactttccttcttggggtccctatccacaatgaacttcttcccagcccatctcttcttcctatctgatccctgcctgatggattatttcccttcatctcaatctctgctcaaataccaacccctctgagaagctttcacttatacccaacccaaatcagtgacccagttgcattaattcttttaccactaattattttttaaaaaactgtaattctttcctgcctagaatatgagccccacgagagttgggacttctccccattgttcatttttcaccactgtttccctggtgccttgtatagagccttctaaatgtaaacgacttatacacatttgatgggcgaatgaatgagtgagtttgagactgcttcccggtattgttgggtctgccaatttttcaggagaaatgagtaataaggatttttatataaaagctcgtaacttttttcaccttggcaactcatttgtattttaaaattgtgactcaaaaggatcatatgtgcaagccaaactgagtcactgagccaccgttttgtgactcctatattaaagtctatgttccaacgttattttaaaaggaaaatatttggtggcaaggaggaaagagcaagtacccaaatgcccatcctcaagtgaccttcttaagactgcagtgggatggtttcactcctcatttactaaaacactgcatctgaaggtttctacaagctagaattcattaacttcttttgttgcttttttgcagtggagggtgcaaactcgatacgagatcatcataatctacttttccatttttacaaagcttgtttagtttcattcaaatctccaatgtcctttctgtggttttttgcagtcttcatctatttgagatcccctaactgacagcatttgctttgacacatcacatgccatggaaaattacagcctggtgttgtagctgattgtgtcagcatgtatttgtgaataccataaagcactgaaatgagacatattgcactccctaatataggaggtaatttgttttttggacggcctgatatttgtgacattcattagtgagagatgcaataggaaatagaattacacaaatgggagtttcatgttatatttgctatctgggaggtatacgtgatatatggttctcctgtgctccccagcctcctgtacttggtgctgagatgctgtttcaagcttttgtgtctcacagtctggacaagggcacaagcttcttctccaggagacctgattggagcacagggagagggaaggttcagtcccattaatcctaatttcccttctcaggtgtacccagttctcaggatactcttgaacaaccgggagattctgtgaactgagtagggaggtatttttcccccacaactcaatcatggcaatctttccccaatttgcagaaataaatttaagttattagagcactcagtttaagaattctttttccttccaacagcccatgttttctttttcccaaaagcttctgtagccagtatggcttagtttgctagagtggatggggaggaagaggaccctaagtatccacggtcacatgtcatcgttctgtgctcagcgtatcaggcttaacctaggcaaataattaagagtgcaagctccaacttcctggctttattcctcactagcagtatggctttgggcaagttagttagccaagttgtgcctcagtttcctcatatgtaaagtgggaaagagtaatgctacctatctcatggggttgcgtgagagtttaacaagttttagatacagagaacctagtacctagaatagtgctggggtgtaataaaccctcctctgtaagaatgtggtagtattattaaatttggtagaaagagagtggattttagaaaaggaaagaccagttccactctgggctccaccacttacttatgtgcctcatggccttggacaaatcacttatctcgattttacagatgaggaaaccaaagctctgagtgtttgagaagacttaccttccagggttattttgaagagcagcaataaagaatgtagcacacctagaacaggcctggctttgactaggaactcattcaatgaagacaataggcttatataactaatgatagaccttcacaattaataatgtacttaaaatattttatgcaatattactgttgagctgaatgacctgtctgaacatttgcatcacattttctgctagtaaatttctccaagttcataagatagaatcaaatacaataatattccatgttgtgctgcaaagggccctgtgaattcctaggctgcttaaacaggtttaaggatacgaataaaaatgtcatgaaacatgtaggccagtgaaatcctgtgctgcacttacagtggcttaacaattgaagctgacaacttcagccacttacctaggaggccacaaatagaaatagagccagtttcatattccatctgaaattaatcccaaccttttgaaattctatttggcagggagagtagtagaaaactgataattctcaagtaaatttcccagataatattaagtaaagagcactagataaggagccagttgtcttgttatgttgttctgaatcatcaggaatcaggatgacctcgagcagtcattcagctctctgagcccccattttctccctcacaaaataaatgagcaggtaactaggcttcctagttctaaaattttattattctcattcaaagatgtggaattcactacatgaactggagtccgtggaagtttttcttacaccagttgatggccatagacatgttaaggagttttggggttatggaagcctgcctacttccgtgggtcaaggtgtctacagccgggccagaaagaaagccagttgaaaataaactcttaccttttaacttctttggcatcacttgcgatgaaaaatcctaaagtaccttcttggatcttaagatggtttccaggattaattaatatactgctcagtgaacaaaaacaaacagagaagatacatttgtgaggtcatgttctgaataaaaccttgaaggctacaccatactgttgtgtttatagggggcccactagtctaaagctttccccaaagattttgtccagagtccaatgtccactgccccatacatttagttggataatgccatcattaagcactactgcttacttcccaggctggcatgctcccagttgaggaaatcaaagcaaatcaaggtattagggcctgggtttatataatggagcagtctagctgccatcatgggcacatgatttgaagcaaagtccatcagaataaattccttttgaaactgctattggtggtcaacacggaagcattattggcctgatgaagctattgctacaacaattttccattaaatgacagagcattaatgggacccctatagatatacataaacatcatgtacacacaccacatattaccgcagggaatggtacaagacacccgtaaccaatgcggaagcaagctgaacgtcttcatgacattgataaggacatggaaattgattccatgtacagcctttataggaagaattggatttacccaaacagtttttttttttaagtcagcagttggatatacttaacaattccagtctgctgtttataaaaacgtacagggtgtttgaataagatgtgtgtctagcatgtcctaattgaggcaaattgagaaaacaaatgcaaacctccccttaaaaaaacttgccctgcagagaagtgggaacctaaatatacattgtcctatttcaaagtggcataaatagattagcggaccaagttgtgtttggactgacagaagagataaatgtatcctaatctaataaatggatgaaacaaacaagtttaattttctgcagatcaaaagcagaatacaagattgtctgatgcagagactgagaaaagacttcaggcttaatggatactgaattcagggattctgaataaaacaacagatacaacagaggtattccttgttctgaaaagatgttgcttaataaggtaatagatatttggaatcagtctaaaggaagttctcagctgccccaaacaatcaaaatatagaggatggtaattaacacataatcttttttcctactgataaaccattccagagaagtgttgtggtcatgaagtgatacgtctgtagtcatacaggaaggacccaggtgaacctttgttcacctggttgggagacctccgagcagatcattattgcaaaataattttttgtggtcacaagaacatctaccattacttataacaatacctgacaggaggaaactgtacttgtgtcatgactattattaacactcaataataccaaaaggctatgaagatttaactgttctgccctacaaccacaggcagcagtgagattcctcccaaatcagacagcagcagtccacactaatagcacggcctgcactgagcagcggctctccataagcacctcctaatgacccctccgccaactcttcacatgggtataacaagccctctgacttcatgcaatcacgagggtgaagtgttagagctcatacagtttagatgaatttatctttcaaagccaattcagtatgatgttttagaaaggcaggattataaattttgcacatttttttaacctcctttcctgcaaggcagtttttacatgccctggctctgcaatcagaatttgggtccaaattccaacactaccacttaatagctgtttgactttgggccagttactaaatatccctagaactcaactttcttacctacaagaggtggataatggtaacaataatctttagagaattaagagagatgatgtatagaaggctcaatgcatgtgggttattgttcctttttttaattcttgcaaaaaaaaatccaaagtgtatttcattttcaacaaagttatcacagattttctctagctgaccccatggaatataatacagtcttcttatcaaaataccttgcccattaatgagatgaaattatagggtaaagaactgtacgctacagaataatgtataaggacatacacaaaaaattccatgcactggctttgcaaatgcaggtaagcctcacacttctcatctgtaaaatgggtcctggctttgcaaatgcaggtaagcctcacacttctcatctgtaaaatgggtgaataatcgctagcttacaatgcctctaagagagttaaagtatgtactatgtgctacatgactgacacatagaaggtcttaaattcttagttgctactctcagtgagctaggtgattataaaactgagaggtaaaaaaatcctcacagcaccatcaccctccactttgtccctgctgctaataaatgacccaggaggtgccctattggcattgaaagacttttccactgactgcaaggaaatccaaagcattttatccctgcacaatatctggtgatgggctaatttagactgacttttgtctgcacagtgaagtatcctgtgttccttaaatctatggctgattgtgtaaggaatcgaaagcatctctaattacctcacagatcatgtggattccaggatgccctcttattccctgtgaacaggggtgagggggtttaaatcatccccatgtgaggtgtaaggcagaaccatttgcagatactaagctaaggctaaggcagccttctgggtgggaatctaaagaatggatccagtccttgaaataatgaaagaaagaaatctagatacataaagatgctcttggcgctgaagcaccagaaactacattactggtttttgtttttgtttttaatattttcgacattaagtcttctatacacattccaaatctagaaagtttaaataaaatgctaatccccgtcttcttcaaaatataaaaagacaaggattctggatagtgataaccttctcccccttttgcctactatctttagaattcgttattgaccttctaataggaacacataaatttttccaaggatctctgatctctttaggagagtatccaatgttaagtttgttttgttctactgactgccaaaagtctctctctctgtgcgccactctgaatcagttctctagctccaactttatataattcactagtttatcagagataaacttcaacatgtgtcatgtgaagaatcaggaaaatctctaagagaaaaagcccatatatccattaacagaattccaacaaggacatgttggcagaggtggactttccctcatttcaaggaacatataaattatcctttcttctttgaccttactggtttcaacagaaaacatccagtgacagctggaagcacggggctggtgtggtcccttgctgtctctgtttcttttgctctcagactagttttaagtctcgacttattctttgtttactcacctcctacatggagcaaatacgtattttctgtaaggaacccacagttgagtagaggggtacaaaacatgatcacattctatttacctttgagtttcctggagtagcaggcttagagccttgcacgcaacaggcacatttcaactatttgttgaatgaataaaaaaaataagtttttaaagcctcagttccataagttttcctttttttcacaaataagtggaaaggaggtcacagttttctttcaaagaacaagctacaattctcatcagtcaggccgattaaaggagtgaccacacctctgctagggctaggggattggccaatgatctagcaatctctcagatgtgttaagtatgaatatgtaaatatcccaatatgtaaacagcctgccacttgcaaagttggggcaattgatttcaacattgaaagcaaaacttcaaagagaaatatgggttcctagacataaaacacatctacgtgcaattggctagcggggctcagtcccgcagggaaatgcctctatcaggtccctccatgagaggagcaccgcgtctcaagttgtatcacatttcattgggtatctctcgctaaacactggtcaggttggaagactgcagcttgatggaggaaagtaatgcattcctttctccaccacttgtgcataactgggggacatctagttttgtcttcaatcattgtaaactttacttgtttcctgtttctgaagacaacctatgattcgtaattcaagtgaaacagatattgtttaaggaaacttctatccattatgggtaaatatgatacatatatatttctctcctctccctttcatttttggtaggtgtaatgtaccattcctcaggcaatttttaaaaaatagcatgacttatatgagaacatactttgtgcttgataacgtagtaattatatttgtgtctagcaagctaatgggacttcattaactaaagcaagcaaataagaaccatttagggtttccattcatgctatgcccagatgaatcatgccattgagaagaggcttctttgatcacacaagttcatatacaatgactctcagttggaactttgtttgaaccaatccgtgtcccctctcagagagtatgactgcatttgtagtttacaggctatgtgcaggcacagttcagagaaaccccacatctcaaatcttatcacctttctggaacttttcattttttctgggctttcaaatacatgctgctgctggagtcccacacaactagacacacacacttttactttaggataccattggagacacagttgtgtatttcatatgtcaatatacttaagcccagttcacttacacacagacagcatgataaagattgctcccagttggtcagactcaaatgactgccactgtggtccaccagagatactggtgaggacttactcagcctgcatccatctcagtaactttagaaatggcattttcaaatatatttcgtacatacaaaaaaatattagccatatgggatggggaacagagaggtgatctagaaaggataatgctggatatttggttctgggagcaagccaaatcattttctggtatacttaggacaagtcatgcctacatcacaacatgccttcaccacaagataaaaggactcaaaggccaaaagccaacagcagaggtgcaaccactgtggacctttaagatgcaaagtgttgcagtaacttcttgcagttggatcatatcaataataccaaactgacaggaagccacctctatttatacacatgtactcaaaaaaacaacagaagaatcagattttggaaaaagatacagacaaatacacacgcacagacacacacacacacacaattacaaacacaaacacatgacagtgattacaatcacagagaaaagtaacttgaaaagatgaacaagtaggcatctcaacagtatgttttcaacaatattgtcttagataacacattattgaaaagctatcctggaactattaacccaaaagtttttttttaaatgccattgatgatgatttagtcatgcttcatgcaatgtaaaacagcagcaaaacagggtgaaatcacatggtgaaaattgagaaacttcatattaagaaatatgcccaaacacactaggaaaaaaaagccatgagtctgtctcaataaacagtactaactctgtaaatcaagtgtgataatctggcaatttaatagcagtgttctaagactatactgagcactgcccaagaaataaaatattcaaaatgttatcaccaaaataaatgtaaggaaaaatagaagtgtaagggcttggtctctgttttgtggataaaaggacaggaattctgctctatagacaagaaactcgacacagggaggaggaggtcactgggaatgtggaagtggtatgtagacaaaatggcactagagtgcaatggacatcaagacacgtcaggacaatacagaaacagacacaaagggctggagagaagcatcctcctgttcaactttaatagtatttgttcccattattggtgccatgactgaaaacaggagtgtgcctttcctttcttaggtttcctgcaaagaagttagtgcgtcatccaaaagaaccaacaaatcaaacaggaacagaaataggctacttccaatttatgtactctagttggagaggggtgtgtgtgtatatatatatatatatatatatatatatatatatatatacacacacacatatataatatagatacaccagacaagggaatgagattatatatacatatatataatctctctcttcttgaattcttggcaaatggttagtcctgtggttaggagtgaagatagagggtggaggttggaagaaaagttaacgaagagtgcataccgctttcggcttctgcaaaacgacaagaaaagaatttaaaatcaaacaatttgataataaatcgactgacaccagaaggaaagaaggaataaaacctttgtttcaaatcacttgaaggatgcatgtgaaaacaaggttttttggcaaagcatgaaaacagtatcatggggtgaaaccaacaacaaaggcagttaaacacaggttaaagaaggtgggaaggagaaacaggtcctttgaattttcacacccagtcagttagaaaatgtgagagggaaagaagtgggacatgtttaaataaagaaaaacattaaaattattatctcagggaagattttaaaaaatgtgtgttttcacgtggatattgtgtttgataagtcctgtgttttctcagaggcatgatccacattccctcaaacacacctttttccacaagaaccaatgtgcttccacactgagaccaagccacatttgagaattaaagctggcaactgcacaaagaaagcccaaacaaagccaaacaagtcctttttgcccttttctgaagaaaaaaaaaatatatatatatatatatatactaaaaactatatctacaaatatggctttgttgaaaacatctcagaattgtgactcaattgaagggcctatccaagaaaagtttcatcttcagggagtgctctgagttagttttcttagaatagtgacattgagttcacaatgaaccattaacagcctttcgctctttttctctccttggaaccaaaaggcaacaagtgaaagacaactgctcaaggttcagggtgcaatctcctgcagtcagattattccagaatggtcgaaaaacactatgcagcatcagcatcacccacatcatgacatttttttttgaaagatgcacaaaagtaaatagagaacactgagttacacaaagatttgcgatttcgcaacacggggaatatcatttgcaaaaatccaggatacatacagttcccctacacaggtacaagtgagtattggcaaaaacatgggtaaacagtaaccccagaaaattccacctcatctgctgaacaactaataatcaggactgtcagtttttgcaaacaatattcttcactttgccaacatgaaaaagaaaatatttatctatctacatatttgttaactgctacagccatgttctacatatggccaccaaatctaccatttttttcttccttttggttgatttgggttttcaaaatagcttaacatttgatcagattgactttgtgagcaatctgatctggtagttaaggtaacagaaaacattggattgatctgtttacaatccagtgttttcttttcttttgttttgtcttgtcatagacacagactatacacttgaaagtctggctgtattgggttattcacccagataaggaaaactccttaaatgatgataaaaggaaacgtctagtcttcccctgtactctgctcagttattaaggtgtttgttggaggggatctgcactctacatttgggcatctgcaggatcaaaaatatgaactatagaggaatagactgtgggtgtcatttcagagaacaaaagcttgagcatttctcaatgagctctctttcttccaaaactattgacaagaactggggagcaaaaaaatcatctctattttatctgtaaggtgtacagtactccatcagcaaaatttcttgttagcacgatgcttcccacctccagtgtgaactcacatattgactgggatgttatctatttcaaccagacccagtccctcatcagtctgatttgcacataattaagtgtaaaataaataaataaagagagctcctgcctctgagctccactctcctggctcatttacatgaagctgatattctgccacctggattttggttgcaccgggagaagcacatatggtacacaataggctgcttgtaatttggctatcaagagagttggtgtctcccctcacagctctaccccaaggctgctgtaaaggaggccagagtccacctgcttttttgctcacagcagtaaaaaggggttttaagttctggtttaatacttagaaggtgaaaagtccaggtcggcatgatcaggtggagatattttgaggactcatccctcttccctggagaaacactctctgaatgcccagcagggctttgggtgccaggctggtctggcatagaagctgcagtgtctgatggggcatgcctcgaaatgtgctctagggtcagagaggttttacatctggttccatgcagataaataatgcacaagaaagcagaagtgaaccgaccgttctcagaacgcactctcaccatcaaaagtgtcagctggctgctgggtcaccgcaaacttaccggctctctcggttggcagacttgtactcaatggctatcattaggagcttgagcttcacaaaacacagcctgcaatgagatggagaagcctcccaatcagttcttctgaatgaccagagccacataacacacactattacgatctttcggtctcctaatgcagtcattaccgaggggatcctcattccaccggcactgtgccaaagggagggggtggaagcaacacctccccatcttccctattaaacctgatttcttgcaagtgataaggtgctggatgctcaaagtgcaaattgcactcaggtctggctgtctagacacagagcccaagcaggaatttgtgcctggggatttactctgggccagattcattagttactcggtcgggtagtaaaatgttaactacagggggagggaaagatttggaccagctggacctgttatttggattccgtttcggtcttttgtacaaatggctcatattgttgttccgagcagacccctgtgtgcttgcaatgatggtaataatacttggcctctgtgtaagtgcccagcacatgacgatggcattgtcactcctggctccatccaagctgtctcacctcatctgcttggtgctctcgactgcagagcagactgctttgaggctggcttgttcctgtttccatcccttcccttgtgcgttccccactctcgatcccttcttctctcttcccaacccatcctcacaggccacgtcaactctaatcttgcaagcagtgggtcttctccagctactgctaccctgtgattttctattctcaaaactctcccagcaccttgtctgtaaccaaatcactgagcctttagtcaattttacactggctgtggtcgctccctattgtttcatgtgtctgaactttgtctccttaaccagagcaacttccttaagagtcctggacttgtttggaattctccatagtgcatagtgaatagacccaccgatacagagaagctaaacaaacaaatggtttccacttactgggtttcaagtctaagaaaataacaaaaggtgcagtaaaatgtttatgcttaaagattttcagagtaagtgttatttatatggagtagaaaaatagaaaacaacctaaatgtccaataataaggccataaagtacagtgcaatatggtactagcattctaaatggcttttcaaagaatatttcaagatataagatcaataaataatatcatataaaaagacatgaacatgtaaatagaacaaatatataaaaatacatgaatatgtaaatggcacaatacagttagatgaacctatacacttacatacttacagaataaaagctcacataaacaaaataattacatacatgatgtatgacaagtgtctacaattagcattaccattttgaataatagaatattgattaactgatagactgaacaatgagttgatgcttatttatttagctccagcattgtaagggggataagatactgggtcacagtgtggggaaggcttccttgtgggtcaatttaatcccctcaatatccctaagaggaagctattaccccaattattcagacttctattgatagctccattttacacgtgatgaaaccaaggatcagaaagtccatgtaacatgcctaaggtctctagctaatacctggcaggataccctacatcttgatctccagtgaagcctattttgtattgggagagacagacaataagaaaatatacaagtgaataaacaataaattcctagatgatgacaagttctatgttgaaaataaaacaacctaagaatataaagagtaactcagaaggggtatatcatctgtgatggttcaggaggaccattctgaggatgcagggagcacaacagcatgatgagaagatatggggaaagagctttctaggaagtagaaacagcaagcacagaggccctgaggcagggaagagctctgagtgtttgaggatcagcaataaattcagtaagactgcagctgagtgagcaaagtcaagcgtgacagtgattaggtcaggaaatgaggggggagcaagatcatgaggtctttgctttccagagcaaggagtctacagcttattataagtggaattgggggattttagttggtttaaaagagaaaagtgacataatcagatgtgctggatagggggatgtgttgctttcaaggaaagtgctgctgaaggcctcatgctctccagggagtgaaaccaattgctcattcctacatgtgaggttgtggtccacagcactgccttcagcagacagtcagatgtcaaaggaccacttctatccaggcatatctgggatctcctggtgatttgcaggttttctgattcctgccagcagaatctaatgacctgggctttgtgctgattatgcagcttgctgaaacaccaacacacatatccaactacagctggaaaatgccatccttaatttatgtcccaaagagcactgctaacatgcaccctttatgggactgttacttctggagcttaaattgtttttttaaaaaataagatagcttatgcaatgtttattgaaccaaattaccaaattaagtaaccactttctaatgtaaatagtagctaaatacaaaaacatcagggagaaggctgatcttaaacttagtatggatcgtgcaaaggttaatttgctaatatcctatgagcaatgaccagtccactttgggactctggtagttcatgggatcaaagatcttcattgcttttataaacctaatcccgctggtaagaagggaagtaacagttcgtagtaatggtgaattatgtcttcctagctactacagtaccatctaccaactggatataaaaagaaaagagtttcctctacaagaaagtcctaaggtctatgtggccttgtattcattccttaaccttataggggatggacccgcagatctgagtcctcttccagttttaaatccataacttcaaaacattcaaatccatacccaagctgattctacaatgccttatagaagccccttttaaaaagtcctttgacccaaaacaagctgtggcccactggccaaaggaaaggagagggatagaatgatgtgaacagagagaacataggcaagccgtgccacaacacagattttcagactcaagcccttcaagattggctgatcttgcccttcctatgcagataacaaactgagcccaaacagaggagagcaactaggtcaaggtcaattgacttttatgtaaaaagccaaaagtggaaatcgagtctttgacgcaatgtgctgcacagatgcttctcatcagaagagaggaaatgaagtggcagtcacaagcccaacaggcagacacattctgtttggtaagtacagtgttttttaaaaaactgtaaatagatgccaacaagtgaattcacatagaaactggcttttcagctttccttgcaaaatcagatagggccacattggcaccacattccacatgctaaaagggagtgcagctgtgaagcacttatccctctggatgggatgtttgttctccaatgtgccacagttcccaccactctctattgtctcagatggcctcactcttcattctttcttgctaactgcctgaaccctataggtatctaagtttttaatccctactataataggtatcctctagatattgcaaaatacaaatcaagtataatacaccatgatttacactggaagcaagagctatggctccctctgtgagtgttcaaatcacacgtttctgttagatcctgccacagagagttggccaatgtcacaatcctgggcttaaggactgcatcctgttgcagagatgcagcctctgttggaggtgtccattggggaagagcagagcaaggtgaatgaacaggggagctggtgtggtaatcacttgtttgcttatctctcccctctagactgagtttttcctgtacaggatgcatgctttgcctcactggcattttgcaaagttcaaagagtaagccttcagtaaagtctggataaataaatgcatgtatgaatggggagtagaatctcatgactggctggagggatggagaaaagataaagtggcaaactaggaaagtctatgcagagaaagcttggaagtgagtatagaatcatgaaacaagctgcttcttagcttgtcttatttgttagaagcagacagatgggaaaggaaggatacagaaggaaataaaagtagtgatatgctctgggaatctaatttttgccttcaatccacaatgccaagatgcaagtccaattctaagatacaacaatttgtccttgggaccttctagagaccctcttatacccttatgtaccccttacactcccaagaatatatatactttcagtatacccagaactgatgttctctggttaaacatttacttgcatcactcaacaccattttttggtaaagaagaatgagcattagccatctaatccttattctaattctgcctttactcaacttacagtgtttcaacatatacagaattggtgtgaaatcaggaagcagggtgaggtgaggtaaggggaaaaaaggaagtaagaaagccttcacaatgtgataaatgggataaaatcagccataagctagcaataatttaattattggtttctaaaataaaatgccccagtatgtccaacgcaggaagttgttgctggttgcaaaaataattacaggggaatagaaatgacttcttttttcaagaaaaaaaatgccacttgtcacaaaaaggtcttaagccagcaatctgcaataaaactgttataataacaagttagattgctttcttgataattattaggtaaaggtctaccaaatttgacaacgacattatacaaagcccaaccccccttttttttttttactgccaacatcatctgttaactacagtagtttcaacccagatgttcctgaacaaaggctcttaagaattagagtccaactgtttctgcctacccagagggaaatacattgttcctgccattaaatcagccccctttactggaaacattacttgctggtgttaattaaacatggaaacctgtcatagagtttgcaccttcaggaagaaaatacaaagaggaggtttggggctgttgaagaggactcaccccacaagtcaggtgagggaggatgaaagaagcaactgtcatcattccccctgaacccaaccccacccaaagcaccagcccctcttcagctatccagagggcccctgggaatgtcaggttggcacatgcaattgaagtagatacggatacaaacactgcacattgggaaacaaggtcttctggatcgaggggctggaatggaaaagattcacattcaggagctttaatttaaaatgacagccgctagaaatcgaaatatccaggtaaagaaactttgaaacatccggatttccaagactcagcaccaagaaaagagaagtgatttaaaatgttcatggaaatgttaagactctttttctctatgaagctttgataggagtggagtgggaaggtttcagaatatccccaccctctctcccactctcttattctctccttctctctctctctttcacacacacacacaaacacactcacacacacacaatctccactagcacacctaagacactagaatttataaatacattacttgatacagacaattaacttttgcctaaagtgtgaacaactgcatttttagagagccttgctattattattaatgagaaacataatatgaaagaaaaaaccatgtgtttgctacaagaacccagtgttgagtcaaagcccaagcgtccaccccatttccaacaggactccttccctgacccttctgtagagaattctggacccaccactgcctcagtagcctgttattgaggatttcaatagactttagggtcaacggtttattcactagctcatagaaggtcacctcttgggtctctgtagtagaaataaccaccaatactgtattcacatctctattcatatatgttcaaccctaattacaatactccccaatcaagtggatgaatagagccagttctgtgaggggaaaatattttttaaaaaatgagatctgccaggtgcggtggctcacgcctgtaatcccagcactttgggaggccaaggtgggtggatcgcctgagctcaggagttcaagaccacccagggcaacatggtgaaaccccgtatctactaaaaatacaaaaaaattaaccggttgtggtggcacacgtctctagtcccagctacttgggaggctgaggcaggagaatctcttgagccccagaggacaaggttgccgtgagctaagatcacaccactgcactcgagcttgggctacagagtgagactccatctcaaaaaaaaaaaaaaaaaaagagagagatctgagcctctccataaattcacttaaaatgctcatttttgcagccaggctaaagaaatctatcatataacaattgggtctgcctggtttctgctccatgttcaaatttggatgtctttctccaaaaactaatgatttcacagaactgaagttaaactagctacagttttcactgggcaagaggcccagctttcgccgggcggtcttaaattttaaatttccccaagcggcttctttttaaagatctgtctgtgcaaaataacacaggttgagagcatgattttctgaatttaggaggggagcactgaatgcagggaggtagaggagggaaaagagaatccccctgcactcttaaaccagcacagtagcatccatacttgcccctgggcttggggacagaactcctgcccttcagcacagctgaggaagatctgattggagttccccaagttccccaggcattaaatactccacatcaaacctgaattttaactgctccatcagctgcagagggacagagagagacacataccatattttaaatacatcttttgtcctaatcccctctgagctgtaaaacctgatacaattaagcttttatattttgcaaatgatgaatgactgactaataggttcccggtgagattcagaacctagaacacagtgttcttgaggcagcccaactgctgaacccatggtttcctgcagctcctccttgtccagcccctcccctcccctctgccctccctgggggtaggggagtgcaccctcgctttcgcaagtgctcaccaaaaacactgttatcagtttcccccaaaaaaatcacaagtcaaaataaatctgatgcatctctttgtctcatctaaagaggaaagcaatttgctgtaactggaaaatctcggagacctaggtgttgagagagctccctatggtaccaggtggcgcagcctccagattccctaccacttagaatgtcctcttccttctttatcccccatctgaatcaaaactcccgacaagacacagctcaaatgtcatctcttccaggaagaacccccatgtccccccagcctacagggagatgtccctataactctcagcatctctattccagctgtgtgcatctaccacagcacttatcagtgggtgtctagatctctctgacgatgggtactatttcccttagccagacagtaaactctggaggcagccaccctagggaaactgaatattttacttggcatttgttggcatttgtaagtattgctattaatcttttcatgcacatatatttgatcaaatctagtagcagtttcctctagaagtggcaccaagcttggcacaatggtgcacatatcccaattcattaaatatctgattaatcggtgattaaccgataagagaatttcctaaaggttaaaagtaaatataacttggatacacatatagctcgcaatgtgtttctttctttctaagtgcttctattatattcaatgagaaagataaaggtagaaggaaaaggagaggagggagaggggaaaagacattaacccgtactgacagataagtcatagcactcctatttcagagaaggagattggagtaagcatctgtgatggttaatattgagtgtcaacttgattggactgaaggatacaaagtattgttcctgggtgtatctgtgagggtgttaccaaaggagattaacatttgagtctgtggactgggagaagtagatccaccctcactctggatgggcacaatctaatcagcggccagcatggctaggataatgcaggcagaagaaagtggaaggactagacttgtgaagtcttccagccttcatctttctcctgcgctggatgcttcctgcccttgaacatcacactccaagttcctcagcttttggactcttggacttacaccagtgatttgccaggggctcttgggcctttggccacagactgaaggctacactgagaatctcttggcttgaaattgatagagatagctttcggggtggcaggaccttctgcccccactgcctcttttgctctccttcctgttctcttgggaaacaatctcaaatttcacccctacatcctgctcccatatcttttcatagaatgactcccctagcttctgagaaaactccaagctctcccaatcccaccctgcaagggagcattttgccagcctagagaaaaagcacatttatttctttccatgctttaagatgttattggctgcatattgttttagcgcagcgcataattacagaaactgctctgaaaatctgtatattttatctgtgctttatgatacccagaatattccccaattctttttcttcttcgtgaaccagcttaaaatatattttggcatcctttatgtcattttgaaattgaatagccaattcttactgtaatgaaaatacttatgtgccagcccagtgatatacaacactacactctaattacggctgtgctttaattaacctgaattgaagagtgttatcattaaactgctggtaactttgagttatggcttttctttaatttaaagtagaaaacacagataattaagcctccagataatcaaatgcttgaggagagcttcaatgttttgggatgttcctaaatctcattaaatgtccttcttttattgatcatttctacctctgctgtatcattgtattaaacgaataatagcactaagttgtacacattctcactcacatcagaagtggaatatatatatattccagaaactttactgagcaaatactaaattatctgacaacaatttgtctccttcttgggacatgttctaaatacaaaaatcaatcaaagggaatattcacagagccactagtgccagctcttgagctggctgaaggccagtgaagttccacaccacccagtgggtcagggttggcaaactcacacaaccacagggccaggcctgggatttatgtgcaaatctggcctggtttaagatatcagggaggagtaactacatgactatactaacccctttgctacatcaaactggagccagttagcattctgaggaaatgcaggtcttgcattgtcacattagattttctaaagaatccagaaatctagtttttacgtgacatactactatttggaaatatcagcaactagttgatatctacgtgagtcaaacatacctagtgactatcccagttagagcctgtagggggagcagtcctgacccttcaagttacccataagaggaacggactcagttcccaagagcagagtaagagaagggtggaaaagcaagaagggcctgggggttggggagggagcactcttgttagatacaaacaccagttaggccagggaaaccctacagccaaggaagggggcttgacggagcccctgctgacaccctcaccaacataagactcccgcaggcgctggcagctctgctatgtgctcagaccaccaccacattagacagccaaggcttcaattgcctttttataaaactagcttctgttaaaaagcctgctttcccccggggctttgtatcctaggcagaccaagctccagggagggggagatcccctgggacagcctcagtgttccaggacccaatgcctctgaatgcttaactcctctcagtggcaggaagagaaatagctctcaaagaaaggcacacatgggagtcacaatagggcatccattttcagaaaataactccttccgaatcaattacctattcacttttccagtccatttagcattaaaactttcgcttagagacagggtgagaaatttcagtaaacagccaaaccattttggattgcttagggtctgggcccagggactgacagagtgcacctgctgtgttcagtgacaggaggctccaggtaaacacgaagccaccaagcgctccgcctccctccctcctgcatacagaaagaaaaccgtgatacagaggaggccaagggcacccaggactgtcccctcctttgtggtaaagcctgatcagttttgtttcgatgtcttcagacctctcttttggtttgtatgtaggcaggaagtgcaagcaaatggcttttcttcctcagcccagtgagctcccagatacccctgtttcttcccagtgagaagaatccttgtcaaatcctttgctaaggtgtcaggagaataggcttaatgtttcaccaacctcagggagtttgtgttttcagagggcacaaagaccccgttcatcttaaactcaacatctgagattttttattattattattttagagatacaatcactgctatccaggctggaatgcagttgcgtaatcaacctcctgggcagcctcaacctcctgggctcaagcaatccttctaccccagcctctagagtagctaggaccatacgtgtgtgccaccacactcggctaattttccttattttttgtagagataaagtctcactgtgttgcccaggctagtcttgaatgcctagcctcaagtgatcctctcacctcagcttctaaaagtggtgggattgcaaacatgaggattctaagtgaggaatctgaggcactgtcatgcctcacggcagacacctggagctcttgaggtcatcccccataggtgaccatctattctacctgcagtggccatggcgggtggctttgatccatcctgctgagccagtggaaagagaagctaagacttgttattattataacatggcagttgtctatgtgggggctcaaggcctccttctgtatatttggttccacatttcctcagcaaagggtgaaaacactttgaatggctttatttcagtagcttctctgttgtctctatgatcagacttgatgggaagacagattaaaattcctttcattgaggggctggcaagatttgttttgccctcttagaatcagacaggcaggggtttatgccactcttcataaatgtgtctacatcacagaaggcatgcaggataactgtagttcataagttagcataaatgatgaattcaagtccaagactctcaggcctgtcaagaaaagtggggccagtggaaattccccaggcagaggccatgtaatgacccaccctcctattcatcacatggggccgagcacacgggataccctcggcaattgtcaagtgctccaactgtacccagcagaggtgggaggcttccttgcaaggggcacattcaatatccctgaaagccaaagagcatccagttaaaggtcacttactcacaaacagtagggaaggacagacccacgaaggcactggagagatattctgtgtacatttcatttgagactccttccaagtagtatttctgccatgtgtcttcctcaatctaaaggaaaggaacacatgcggagagtttaaaatatgacggtgggctgtaaaagggaaacctgagttacactcttaggcaaacaaatgaatgcactggttagataatggtgaccttttcagcaatcaggaacacggcctctgcacccatataaagccttcaataaccctaaactcataaagtgtgtgccctctaaaacacttttttaacctgtgtgatttctttcctttttcttttttctttttctttttttttttttttttttttttgagacagggtcttactgttgcctgggctggagtgcagtgggtcatagctcactgaagccttggacacctgcactgaagcaatcctcctgcctcagcctctggagtagctgggactataggtgtgcatcaccacacctggcaatttttttttttttaagagacagagtcttgctatgttgcccaggcttgtcttgaactcccggcctcaagtgatcctcctgctgctgcctctcaaagtcctgggattacaggtgtgagccaccgtgcacagtctttaatctgtatgacttctaatggtgcggagacatgggcactcacccacattagtgggcaaggaaattgatacaactgttttgaagagcaattttgcaattattatcaaaatttgtaaaagtacacagtcttttacactacaattccatttgaagtattcatagcaaagaaacaggaaaacagaggtaaaaaaatatacaagaacatcctttctattcatgaaaaatgggaaataaccgtaaatggcacacatacaatggaatactaagaagcaattaaaaattataatgaaaatgtatacctgttcatacagaaattctgtaaaaaggcacattataaaatagtgtacataatctgatcctatttttttagatggcctatagttatctgaatgtttgtaaagccataaaaagaatttaggaagctttatatcaaaacactaacagttgttacctctgagtggtagaatgatactttttttcctctatagattcctgtattgtctgaaggcttttataataagcatgtatatattataatgaaacagtatatttctactttgcacaaaatgacagatttttctgaccccccaaggaatatcacaaaaggtaaaatgttagtttcagagatgtcttgctccaaatttcaaaaggagtatcacaaaagtaaaatgtagtttcagagaggtcttgctccaaatttcattaaaatatgcattttttctaagtagtcaagtttagctggttttcccagcaaccctcttcatgctaggcatctctgaaaggatttcacaatgtagtgaatcttcttttttgtttttttgagacagtcttgctctgtcacccaggctggagtacagtggtgggatctcagctcactgcaatctctgccccctgggttcaagagattctattgcctcagcctcctgagtagctggaattgcaggtgtgcaccaccatgcctggctaattctttttttttttttttttttttttttttttttgagacggagtctcgctctgtcgcccaggctggagtgcagtggcgcgatctcggctcactgcaagctccgcctcccaggttcacgccattctcctgcctcagcctcccgagtagctgggactacaggcgcccgctaccacgcccggctaattttttgtatttttagtagagacggggtttcaccgtgttagccaggatggtctcgatctcctgacctcgtgatccgcccgcctcggcctcccaaagtgctgggattacaggcgtgagccaccgcgcccggccctaattcttgtatttttggtagagacagggtttcaccatgttggccagactgatctcaaactcctgacctcaagtgatctgcctgcctcggcctcccaaaatgctcccaaaatacaggcatgagccactgctaccggcttacaatggagtcagtctttagaaactggtgaattacaaggagaacgttgagccgctatgggagcttagggatctcacaggcctccctgagggaaggagggcaagctgtgtgtctttggctgcagcctctcaggcttcccttccagtgggggcatgggtaagaggaagatgagaggaagccaccccgccaacaggaagtggctctttagaacggcttgtgcttatcttgtattaaaaggcatcttgctggcagccagtcagtcagttcactgggagaaatgcaacatgtggaccagaaggagagctaggaacagtgggcaagggcacacctaccatctacttggtgacactccagcatacaaaagccagaaaaaatttagaaataaactgaaggctccctggctctgtgctctttgtctgcttttagctcagtctgggcaattagattatgtaggttaacctcattagtttgagctgcttccagcctactcccacaggttagacattagctaggcagtgctgctgggtatgagcagtttatctacaaattggccttccccagagtggggtctttaaaaaaaaaagtcactcaaccaattctattgctaaatggtatgattttaaaaattaactgcaatgtgtttagctaagcctgaactttttaatttctccaaaccataagatctcaataatttttttcgaataaaagatatgcttgacttataagcaaaggtcactaactctaactaatttgaagaaagcctaatctgccttagtaaaaaaatgttggaatatagaatatttgggaaacagtattaacataatttgttttattaatgaataggatactatatgaggtatcactaattacaaatccccatactagagccttatgggcaaatagtattcctgaagtaaaataattcagcctattcttttcatatgtgttcttttataatgtgttgtttatggtctaatttaaatacaacaactgattatcaaaaataatgaaaatacaaacctttattattgatcattggtggtattcctcaattaatatggttttaacaaggttcttttagttttggtcagaattttcatgcctttatgtcctaatgaagctattctttataccaaattttattgtaggtgaatcactaaactttttaaataagaaggaacacattttttgtaggataacaatattattcatgtttgttttgaatttagcaaaaattgttttattgagtcattcattcagcaaatattgactgcatatatttttaatcttaggatctgttctagcttctgattaaatcaaaactggtatttacttccccatatttttctctttgctagagaaagcaccagatgtatctgactatgatatacctgaccacatatatctgacttttactgatttttccatatcttttttcctgcaagtttgcctctgtggctaatcaaaatgcttgaggactgaaagtcgtataactggaaaaaagtacagaatgttctagaaaacaaaatgcctcttccacatccttgtgtagacctgcggatagtctctacacactagacctagtagcatcgaatcaactgaataaatgctggagcatttaaatccgttgccattgccatctgtttaagatttccacatctttaacactatttccatatggatagtcaatatgtttttgaggtttctggtaaaggaatttcactttaaaaagagtctaaaattgctaattgaattacactgtcatattctcaagcaatgtatgtagttggtgggaatgtaaagtggcacagccactgtggaaaacagtatggtggttcctcaaaaaattaaacatagaattaccattggattcataattccacttctaggcatatatccaaaggaactggaagaaggatctcaaagagatatttgtacactcatgctcacagcagcattagtcataatatctaagaggtggaagcaccccaagtgtccatggacagatgactagataaacaaagtgtggtaatttacaatggaatattattcagtcttaaaaaagaagaaaactctgacacatgctacaacatggatgacccttgaaggcattacgctaattgaaataacccaatcaaaaaaggacaaccgtgttatgattccacttatatgaggtacctagagtcctcaaatgcatagaaacagaaagtaggaaggtggctgccaggggttgcagggagagggaatgaggagtcatcgtttaactgagacagtgtccgttttgcaagataaaaagagttccggaagtggatggtagtgatggtcacacagtcatgtgaatgttccactgaactacatgcttaaaaatgattaagatagtaaattttgtatgtgtattttatcacaattaaaaagatttttaaaacccttatgtataacataagagcaggagaatcagtaattataattaatactgagaccatttaatccttaagtcatgccagaacaaggacacgaataggccaatcacatcagacaagtcaggagtgagaacccagagtcattacatcatagtgcatcacaaactcagcaacagaacttcagtctttatacctacccaagggctgaaattatcaccttctatcaaggtaacttttctaagtctcgagtgtggtatctttgacttactttggaaaagcaaaaacaaaagtgtacatttctcatacaatgcattcttaggacagaaaaaaaaaacagtgtaaaatacattgaatttaaatccttagccacacctgtatcccagcactttggaagctgaggcaggaagtttgaggctagatatttgagaccagcctgggcaacacagcaagaccctgtctctacaaaaaattaaaaaatttgccaagtgtggtagcacacccctgtagtgccagctactcaggaggctgaggcaggaggatagcttgagcacaggagttcaaggctgcagtgagctatgactgcgccactgcactccagcatgggcaacagagagagatcctgtctctaaaataaataaataaaaccttgtgtttaatactaagaaaatgaaagtgaacaaagaaatctggaccaggtaaagggagttattgtcattatgaattccccttttatagatgataaaactgaggcacagagaggttaagaaacctgctgacagtcacaaagtgaatccgtggtacaaacaggattcagagttcacactcttaaccacccaccacaaagatagaggtgtagggaggttgtggtgttaggatttcggggaatggggaggatttgctgtgtacaagtaccaaagagggaaatatcaaaaccgaagcccatcaaggactcaaaagcccaaactctgtagcctatgactttacgagacgtctagcaaggagtaataatccattttggctctagctgaaagggcggttcaagcctcctctcagagcataaaagtatggtttctattatacaaaatggaaacttcctagcctacaacttctttcctaaaatagtacatgctgttccccacatttgtgttgtcaatgtatttttaactgtaatgtgaagacacacttctcagcagaaaaaaatgaaggaatgggaccaaaatgacttagggaaaggtgccagaattaatttgccagccattcagcaatcagtcaaaggcagagcatttcctgaggcagcaatttatcctttggctgtcacatcaaaccccagctgttttagaagagcgcctagcaaagatgagcagatgatgctctgtgggtccttattcatcaaatacacacgggatcatcagtgagaacaggggactgagccaatgaactagcttgcctacacctctcatttactgtcttatttatctactcttcattatctaatttttcatccagtctagttgaacctcccaagcaaatggtttcacaccaatccacgggcagacagctcccccatcaaatgtaccttccaactggaaacctcagccttggctccacgggaagtcacaccttcctgatcccaggttctgtgtgtgtcactaatggtgggttggtaatgatgccttttattttttatgcttcctctgattagagtgaaactgtgtttctctaatgctaacagcccagtgaatgtgaaaaattcaactctcctggctgggagtatgttacagccatcatgatttctgttcccagtaaaaagtctgaataactgtgttgattacagccaaataatcttgcaaaagtccacctctacccgtgaagtcatgtaaataattccaaagattgtcatatactagtccttatttaattgaaaacaggcaaattcttttaatccaaatatacattatattatgcacatcaaaaataaagcactaaaaggaaattataaaaaccaatgaccattatgttaatagctgcaataagaagagatgagtcgtaacatatacacactaacactgcccaaaacaggtagtagaaggttagtgtattcacaagaacttactacatttactatttttaaaaagtctatctgaattttcagtaaatattcttcctataaaggatccacagttttaaatcttagaagtgcttaataagaattagagacatttgaatgaatatttatatatatcaattatgcaatacattgtcactgtcctttataataagattgtctgaaacagaatgcagtcatatgaactgactggcatatcttagatgccattaaaacgtatttatcatgaccccacaccccccaagaaaaccccacaaaatgtgtcaagtccttgcctacaatactaaacatgaaatcagaattgatgggctctaagttgatgaatgtttgggctggttactaaaatggatggggggtcatttgtatccattcctcaacagcatgctctgtcaaggggaaaagtttaattgaatcttgcgttttctcatttcttgctgaaaagtacgatgttaaggccagcaaggtattaagaagacttcatcatgggacttgtcagattctctcctcctctatttccctctatgttccaatgtcaacaaacttgccccagtttttatcaaagggcatgtggttatctccttctctaccccttcttagcctcttcgttcttcagtataattgcaaatcctaaaagcaattcatagaataaacaaaatgaaatgtttgagtcttgttagctgaggtccaaatggtgccagcacagagaatgcctcactgcacagctttctggggtggagttaactagtgatcaagttgaagccaaaggaagaaagcagaagagaatagtgatttgcaccttttcagaatgtatttcttctctgtgccaaactgcatctcagcgctgaacttcttggatgtggactcagttcagctgcctttctgaaagttgcttggatttcagggactccataacaatttggcattccacaattatggcctctttcagagagcattttccagaatgtgtgactaggacaaaaagatctcagatttttccaaaggcttcaggacaatgtcaattaaaacaattttggggggatttgatggaatgccagaaaactggttgcttcagccatgaacaaataaataaacaactccaaatattaatttcggaatggacttgagccaaatctcttactcccagaccagtgggctgcagactatcaaatgagatttcttccatcaggcattatgaaaaagaatcaacccacacgaggtgttcagagggcgattaaaagactacaccacatgtaaaagtaccagaatacatggtattttccctcactccattatcccaaccaggtttatttctggaaagacagagtgccagaggaactgaaggtaaaggaagggtaaacagcaagagtgatatgagaactttttaaaataataattgagaaattattttttaaagtgttacatatgtggcaggaaactggtctttttttttttttttttaacacatagaaggttttgccaccctatcctcaattttctctccaatatagaaaaggtgtttacacttaagagccttttttaaagattggcctattcactctctgttcagagaggaatttggttttgcaaccttgctaatagtaaagaacatatttacatgtccttcaaataataaggattcttaaaaataccactgaaaataattcttatttgggtaaattgagcaggaagtaaatgttttcagtcagacgtctgccaaaccaaccccagaatagttcagcttcgtatgcagggttttcaggacagcccttcttaccccatctgaggtgagggaccagggtttagcttttatttctaatatccattcttttgcaaaatctaataaaaatgaattacaggccaggcactggctcacgcctgtaatcccagcaatttgagaggccaaggcaggaggatcgtttgagcccaggagtactagacctgtctggacaacatgatgagacaataaataaataaataaataaataagaattacaaaaaaatgaaaagacaaatccaatgcaaggtacaaatccaaaatttttatcatagattcacaatccatataaaattaatccatccaattgctttgaaagtttctaagcacttactctcatcttctgtacttaactcgtcacggatgagtatcaaacagctcacagtccccatctatggaccatggaccacacttggaattgtgctggtccacaacatggcaccactctgtcttaaaaatctgacttcccataatttcccctgcttcagaaaagcagaattgttctcaactaatacttcacagaaagaacttgacaaaacttaatagcaggtgttatctgaaacaaaggagaatggggaggggattctgtggtggcccctactagaatgtgggaaatgttgaaggcacagatttttacctgaatctccactgcctggaactgtgcgtggtacatagtcatagctcaataatagtttctgaatgaatgaaataaacttgggaagcacagaatttaacaaagccaacttgttttatttaattttattattttactttcagcacaatactccttagagtatttaacatgttaagaggaattgtaaatctccaagaggagaacatgacttttttgtttttttgagatggagtctcgctctgtcacccaggctggagtgcagtggtgcaatcttggctcactgcaagctccccctcgcgggttcatgccattctcccacctcagcctcctgactagctgggactacaagcgcctgccaccacgcccggttaattttgtttttgtatttttagtagagatggggtttcactgtgttagccaagatggtctcgatctcctgacctggagatccacccgcctcggcctcccaaagtgctgagattacagacgtgagccaccgcgcccggccagaacgtgatatttagtcacagaatcctttatttcaaggagcagcttaagaagatgggaaatgctaatctaaaaacttcctctcctgacttcccaccctgaaatctctgtttcccttgacgcttctatcacaaatatgtctctctatgacctttttcagttgtcaaaatccagtgcttcctgtaactttcaagtcataaactacctcctctctgaggcctttcctcatttcaccaatgtgctgtgctgtccctgccttaatgggaatagtaactgcacacatctctcaggaggccatgtgggctgaatgagatgatcagtacagaatgtctagaacagtacctggtacttagtaagtgctccatgtgtggtgattagcattaagtaccatcacagcatttgacttctctgacatctgaagagaactacaatgaggtggaattccatttccgtatcgactgtaagctccttaaaggaagagctgtcttactcagctctgtatcttctagaaggagcagcacagtactttgcaaataagaggtgctgggttaatatctgctgagttgaactaagcaagataaaactggagagagaggcctaaagaaacaagaacaatttttctaggcatctgatcataagtaagcatgaataacttcaataacttcatagcgtttagtgttggggcatgaaataaatcaattctgcttctgagcatggaaaaaatttctgcactgttaggatctaccagggagtatgtataactgggtcatttttacacttcccaaaaaacttcttactatgagcaatattttctgggaaatttttcattacagaacatcttgggcttcttagcaactgacttacggttttctaaattctaaatccgataacttggaggcttgaatttgaaagacaaaactctcaagaactgatatattgccaccaatctaactggagttattcctactagctagaagtcctgcctgcattcctctgggagaggaagccccgtccctccccatctcatgcctattctatcttccccatgtgactcagccctccttgtcttctccttgtcttcattttttggattccaaagtaaagtcaaacaacaattcaacaggaagtagactgagcccagggaaggtgatatttggcaagttcattattcctaaattctaaaattgaggccaaaacaacttgatcttttctaaaaaaaaaaaataaaaaaacaaaaaaacaaaaaaaaaactgggagaagaggaagggagttagaaagaacatttgaatccacataggaatggggagcttgcttttgataacacaaaaaactagagagttgcctgtgcctttgaaggatctttactattttagacagtttggtgagaatcccaccagccactgctgttagcaaatgacaaggtctcaccagtggatgtgtctgagggcttacttagtaaaagtcctttgaaatatggagtccagtgctatctatactttgatatgcacgtatgtcacccaagtgtcttggcaaaatccagtttctcatgccttagtcctgaggtggggtcaagtctatgagtctgcatttctaacaagctcgcagatgacactgatgcttcccctatagggcccacattttgagtagcaaggagctgttcccaaagacggtgaagaataaggggcaagtattctccatgatgccttgaggacaagagattcagaagaatcgattacagcctaaaggatttgaaccagagatgaaaaagaatgctttccatgaagtattgctagatattggagccagttacagagaaagcttttagacaattaagcacaagatgggtatccaagtgtttgggctgttgtgataattagcctaaacaatatttcaggggtccagatttatctacttagtctctctccattgattcagtgaccccagtaatagctgaatctccattggaatgtgggttgtgtagatacagaagcaatatcatgactatattgaattcaattaaaaataaagtttcagaaaatggccctgatttgcatccctaatttctattcaactttcccattttaggacacagtattgagtgtgaggacgaaaacgctcgccaacccagtcctgttttagtgacagcagattctgggtacttatgtctcctatcgccatacaatatggcctaataaagtcgcgccaaagagactagatttcatttcagagcaaagggttcagtcgtaaactttagctttctggctgaacagagccattccagccgcaagcataaattctgctagttttaggtatcagagtgattgggaagccaaatgggttatttgtgagcctggtagcaaaggcagaagcgccagctttattgtgtattcattgttatctggacaatctcttgtcagttagagaatattttcacaggaagttagaagcgatttcagaaattcccctctgcagtttctcagagtggatgttaggcctcatcaaaaagacatttggttcagagattgaaagtgggcagcctataaattgctgaggtatttagctgggcttagcagttttcctttgaggaggaaaccatgatcctgagtgctcactgagtacagcagggaagtgcctaagttcacgcagcctctggcttcaaaaaatcccagccttatcatgtgctcctgagccaaggagcataacctctccaagccttaattcccttcacctgcaaaatgagagcaacactagtacctacctcctagggaggcagctgaaatgaggtggtgcatgtaaagtgcttagcagggtgcctggcaaatagctaacatttgtggagtactttctatgcaacagatgagcatgtgttctaaccatactaagagatggcatttattgagtttgtaccttgtagacagtctatacatgtcagctgtcattataagtaatgagtgatagtgatagtgatgatgctgatgatgctgatgatagacaagatagctctactgctcagacaaaggaactatgccaattagatgtggggcctgtgattcatggcttcctattgcttagctgctgctagaaaaggctggaacatcagtgatcatacagtggttctctgaattgaagagaaacattaagcagcctgagtttgtccccaaaagacagcaatattctctggaggtcctctctgccacccatggactttcctaacggccagtaagttaactctgggtagatatgatgataagggagaagttgatattttgaggggacatgatggtctcccaaaatagaaaatggatcatgtgtgggtagcaccattaacatgatgcaggatcacccagcctggctttctgaaaggagccctgggcaaacaggaccctgatgaccagaatgacacttgcccacatctctcagttagtactccccacacactattcgtacctgtcgttctccttcctatcaaatggctttgctactcacttccagccttgcctccacgactgattttgaatggatacctagcatatccttggtccacaggatgagtgtgcaaaaaaaaaaaaagggtacttattcaaaatattctttttaaaaatacttgtccagcttgtatttggaggacagacagagcagtagatggggtgatagagagaggaatgatccctggtcagagtcttcagctactgaccctagtaattcaatcttgagcccaattttgcatactcagcaaaagaaaagttttgcagtcaagcagacccatgctttttagaaagcaagttataaaatatctgtcattacttgaacatgccatttgggaggaggagactcatccctcctagccgaaaaaccgtatcaaagtattcccccaaataccttattaaagtattcaaagtaatctcaaactttctgcctcctgagaagagttctgggaagcacacttttctatttcttgttgcatttctagaatgttttaccactcattgtagttcagcatccccagaaaactgacaggcaggccatcaccctgcagttggtataagatggaaagagggagaggacttgctatgatcctgtttgggcaaagagacccctccctgtccccatgctcacctgtcccatgagcaagttcaagtcaataatacatgtctatccactgaggtaactcattgcagcacacagctgttctccttgcagtcaacaccagtgcagagctctccctgggcaaagctgcacttgctggatgggttttcattaacatatgggaaagaatagtcagcaaatcttcactgttgcagaggactgggaaaaaccagacagatgcacctagttctcacctatccatgcagacaaaatcatctagccttagggagtggagggtgaattgccagagacgctgaaggggttgggaaaaccagtgtcatttaggttgatgaacaatgctgctgccctaaaaaatgtattcagtcagaaaattctgctgactccgtatctcaccacaaagagctccagggaccttccccgacatcagtcatttacaaaagtgttggcaacacaaaattgtaagcactgtaggtagggatgcctttatgccaccttagagggtggttttatatcaggattattcctctatcttctcccatcagtgatccagttctgacccagtctcaaatctcatcacaaatagaaagccaaacagcacctacctccatctcttaagaaagttgaaggagagaatttatagactgaggggtaggtgctttcatatacggataatctttcaaaaataccataagctcttccattttttttacagcaggtaaatagggagctaagagaggttcagtagccttccccaggtcttacagcaaatcgcgtcctaatcagagtcttataatccttgccctgtcccatcctgctgcccactgcacagccgcacaacccccctcacacttcacaaaccagggataacaggaagggtgagggctgtggtagcaattttggataatatagtggtccatgggtacttatagcagggaaatactatctgagatcttcagatgatcaaaattgaatcctagttagactggaatacccaatcccattctgaaggggaatcaaatattcctctttcagttgttcttgcctctctagcctatttaaggagaaagagaaaaaaaatactcaaccacagatagaaatgtccttctcattgccaaattttagccaaaacaagaaatcaacagaagcttcttaagaaactatacctatttgtcccagtctagaaaaaggagaaaggatagaatccatcaccctaaaaagcaatgccacaggtatgggggccaggaataaacagacttccacagccagactgacaacaaagagcttctgcacaccagcatcagtgggcacagagatatatgttacttctcagtgggcagagataccctatctacttacagggtatggaaaaaagagaggaagtgatgactcttattcatagatattaattagttacatccacttcccatcctccagtgtatacagagtacagccatcaagacaggacccctgtatttctccgaacatgaaaccctaatcactgggactgcatcactcgttaccatgaaatacatgtggcagttaatgataaaaaccacaaaaattacactcagttcaaacgttttattgcatgccattcttcaagatggcagatggctgcctaaattgatctcagtgtcatgttacaggtgcccctaagtttctctaaatcagccaaatgagtttgaagttgaaacggccacctcacattgttctaccaggagacgcacaggatgccactgtaatgcagtttgctgaattatagtattcataggctctgattaaaaaaaaaataggtgaactacctgaaacttgccccacagagaatgattattgaatatgctaaaaagccatgatgctgatgaccctgacttaaaggcaatattctccccattctggctgtacagggcaaacatagcatatggcggctaaagagatatctgagttactggttctgggtaagatggagttatcacagttcatcctgtctttcccactgaatgatgttctaagacctggacagaatgcatggagcagctatttgaagacattgagaataaacaatggcaggtagattgaagaagacccgaattagaaataccaccaaatcagcagtgaatttaccattgttctcttctggtatcctctagcctgacctcgaggcagccagaacctggaagggatcatcaagatgtggacaaaaaacctccaggagaagcctcatagtagaactaactaatgcgaggtaactcttagaaaaaatggaggaaatcactgtttttccctccctccctccctccatccattccttcctccctctcttccttcctctctttcttctttcctttcttcctttctttttctctcctcctgtgccccaacaccaagccatctagtagtggcagtagcagtggtgacaatgcaagccagaaaaagattaaaggagataggagaattttcctctctgcccaaaaaacctatggtcctgagagaatgaaaaccaaaccctattgctttttgtctctctctgcccttctaccagttggccccagatgtgaacacaatcacagaaagtatacagaaagccagataactaaagcctcagcagcccttccatcaaaagatcaaaaaggaagaccccagggaacctgaaaatattgcagagatcacatagaaagaggacatggggaagtagtcactaaattgtttataaactctggggctcacgctaagctgtgcatggatgaaactgaccctacacagcacatttagattctaagaactaaactacaatatagaccaccacccagtctgagggcaatattggacagatccaaatagcactgccaacgctttgaaaactcaactaacattgaagtcacaacccatagaagccccataagaacctgtagcctaaaatcaagccgatcaggccgggcgcagtgcctcgtgtctgtaattccagtatttgggaagccaaggcgagtggatcacctgaagccaagagttcaagaccagcctggccaacatggcaaaaccctgtttctactaaaaatacaaaaattagccaggcgtggtggtgggcacctgtaatcccagctacttgggaggctgaggcaggaaaattgcttgaacccagaaggcagaagttgtagtgagctgagattgcaccactgcactccagcttgggtgacagagtgagactccatctcaaataataataataataacaataataataataaagtaaaataaaataaagcaggtcattaccttccaaaataaaattatcaacattcttacaaaatttaaacaagaatcagagtttcataataaaaaaattaaaatatccaagacacaataaaaaattacttgccataagagtaaccaggaaaatctcaacttgcatggaaaaagacaatcagcagatgccaatgcctagatgacacagatgttggaataatctgacaaaaaccttaaagcaactactatttcccgataactaagaaagaacacatttgtaaagaagtaaaagacgggatgcataatttaaaaatcaaaattttaaaaatcaaatggaaatactacaattaaaaaatacaataactaaaacattcactgaatgggctcaacagcagagcaaagatgatggagggaagagtcaatgaacttgaagctaggtcaatataaattgtgcaatttgaacaacagagagaaaaaagtattgaaaagtttcacacagagcctcagggtcctctgatacatcagaaaaagatttagcatttgcatcataggaatcctagaaggaaagcagaaataatatggtgcaggaaaaaaaaatttttttgaggaaacaataagtgaaaacttctttaacttccccagagacaaacctagcagttgaagaatctcaatgaactccaacaggataaacccaaaagaataatgcctagacacattgtaagcaaacaacagaaaactaaagacaaagagaaaatctagaaggcaatcggagaaaaatgactcattacttataggtaaccacaattcaaatgactatggatttctcatcagaaacaatggaggcaagaagaaagtagaacaacacttttaaaatgttgaaccctgaattctatatccaccaaaatgtccctaagtaatgaaagtgaaataaagatattttcagatgacagaaaacagtgtttgttgccagagcatggctctgaaggaactgctaacataagttggacaaacagaacaggaatgatactaaaaggaaggaaacaaagagaaaacaacaacattaataaatattagaataatataatagactatacttctcttgaattctttaaaatagataaaagcaaaaattataacattgtctgatatagtttgcaacagctgtaatacataatacaactataacataaaatggggagggtaaagaaacctatagtttggtaagggttctacatttcacttaaagaggcaaatcatggaatccaagtagacttaaaaagttaagtatgtacattacaaacccatgagcaatcaattttttaaaaactatataaagaagtataagaaataccacagaccaaaaaaaattctgaaaatgttcaaaatgattcaaaagaagaaagaagagagttcaaagtttttgaaaaattagtctaattttcaaaactgaaacaggaaacaaacagaaagcaaataaaatattaggcctaaatccaaacatataaataataatattatagataaattgtctaatgcaaccaattaagaaagagagattcaaagaatcgatttttaaaaaatcacccgactataaactgtctataagaagatcacttaagttttaaagataggtttggttcaaacaaaaaagaggagaaaagatatacttttttccatgaaaacaccaatcaaaaaagaaagcttgagtggctatattaatatcagataaagtagacttcagaacaaagaaaattacaaggatatagggataatatataatgataaaaaggtcaattcaccaagaaaacgtaacaatctaaagtatatgcacttaacagactttcaaacacacacaaagcaaaacctgacggaactaaagtagacaaatccacagttataattggagacttcagcatccttctcgtagtaagatgcagaactagcagacaggaaatcagcaagggtatagaagaaatgaacaacaccattagccgactagtaataattgacatttatagaacactctgcccaacaatagcagaatatacattctttttaagctcacctggaacattcaccaagacagattacattctgggccataaaatgcaccttaacaaatttaaaagaattgaaatcatgccaagtaggttcttaaccataatggaatcagactacaaatcaataatagaaagataagaggaatatcttcaaatacttggaaattaggcaacacacttctaaataattcatggatcaaagaagtttcatgtgaaattagaaaatattgttaactgaacaaaaatgaaaacacaacatatcaaaatttgtggaatgcagctaaagcagggaccaggaagaaatatatagcacaaaatgtttacaccaaaaaagaagagtctcaaatccaaaatctaagcttcatcttaagaagaaactagagaagaggagcaaagtaaatctaaagcaagcagaaaggaaacaaacaaacaaaaaatacaggaaataataaaaccaaagccgattatttaacaaagatcagcaaactttatatctagtaagagtgacaaataagagagaagacacaaataacaaaatcaagaatgaaagagtggttatcactgcccacattaaaaggacaataatgggatactatgaataactctacatacataaattgaaaaactcagataaattagaccaatttttcaaaaactttgaattgtcacaactcacccaagattaactatttaacctgaatagtcctataaccattgaagacattgaatttgtatttaaaaactttcagaaaagaaaaaaatctaggcccaaacctagtagtatttcactgccaaatactactaaatatttaaagaaaaaaaaatcaccaattctacacaatttctcccagaaaacagaaggaagggaaagatttccaactcattttataaagccaacattacctgacactaaaatcaaagacagtctaagaaacgtacaaactaatatacaccaaaaaacaaacacacacaaattcttcataaaaatattaacaaaccaaatccaccaacatgtataagaaataatcacactaactagggtctctcccaggaatgtatggtggctggttcaatattgtataatcattcaatgtaatttaccatattaacagtctaaagaagaaaaactacatgatcctatacattgatgcaggaaagcatttagcaaaattcaacctccattcatgattgaaaaaaataaaactctcaccaaaatagaaatgggaaggaactccctcaacctcaaaagaaaggtatctacaaaacatctatagttcatatcatacttaatggtgaaagaaatgaatgttttcccttgaagacaggtgacaaagaaaagatgtctactcccactccctctattcaatattctgcaagaagtgctagccggtacaatatgattgccaggtacaaggtcaatacagaaacataatgtatatttctacataccaccaatgaacaattggaacccaatttttttaagatgtcatttataatagctccaaaaatgtaaaacttacatataaatctaacaaaacatgtacagaatcttgatgctgaaaactataaaacactgggtaaaacaagttaaagatgacctaaataaatgaagagaccaaattgatggactggaagatacgacatagtaaagatgtcagtgctcccccaaattggtctataggtttaatacaattccaatcaaaacacaggaggaattttttttaggtataggcaagctgattttaaagtatatatggaaagacaaggacactagaatagccaaagcaattttgaaaaagaatacatttggaggactcaaactttgtaatgcccattttaagcaacagaagattgttcctagaccttgaagctcaatggagtttgccatattggaatctgaagttgtttggttccggtacctcctttcatccttccatattctcccttttggaatggcactgtctatagccattatcctatggctgtcctgccattgcatttggggtgcagagtacttgttttctagtttcacagatccaaaaatggagaagaattttgtcccaggattgatcacacccaaagtctcacccataactgattagatgatgacattgggacatgtgagttgctgatcttcagctctgattttggacttgaattgttttgcagggttgagacttttggggatgggggaatgaggtgaatgtattttgcatgtgggatgaatgtagatttttgcagaagtgattaacgatcttgtgataggaaggttatctaagtgggctctaaatgtaatctctattgtctttttagaggaggtttggctaaagaagaagaaataggagatgtgacaatggaagcacaatgttggagtgatgcgatgacagggacaagagccaaggaatgtggtcagcctccagaagctagaaaatgcaaggaaacagattctcctctagagcccccagaaggaaccagccccgccaccatgttgactctaactccactgaaactcagtttccaagttttggcctccagaaaaggaaggaaaaaaacttgtgatatttacagcaactaggtttgtagtaatttattgcagtagccataggaaactaatacatagagtttcatttatcttgggtagatatctaggagtggtatttctgagtcatatggtaactcaatgtttaaccttttaagaaaaactccaaatatttcaacttaaaaacttctttccaggaaagaaagtttaagttaagaaaatgaaaacacaagctacagattaggggcaaatatttacaaattgtatatccaacgagatccaaaatatataaagaattcttaaacagtaaaaaacaaattcaaagaaacaactcaattaaaatggacccagcacttcaccaaaaagcatatacagatgacaaataaccactgggaaggtgttcaacatcagtagggaaatacacgtgaaaaccacaatgagataccacactgcccacctactagactgtttaaaataaaaagtattgacaatgccaagtgatgataaggatgcggagctacagaaactcctgcattgcttgctgatgggaatgataaatggtacagtccttctggaaaacactttggcagtttcttttaaagttaaatataaacttaccctataatccagcaatcctaattcgagatacttaccctagagaaattaaaacttatatccacacaaacttccatgtaaatgtttatatcgactgtattcatgatcgccccaactggaggaaaactaaatggtgtccaatggatgaatggataaacaaactggtacctgcatataagatgtcatactattcatcaacagaaaggatggaatactgatacatgcaacaacctggatggatgtcaagggaactatgctaaatgaaaaaagccaatctcaaaaggttacatgctccatgatgcctttacatgacagacttgaaaagacaaaactgtaatgacagagaatagatcagtggttgccagggcctaggagtgacaggagggtgtgactgtacagcatgagggaatttgggggtatggaaactatcctgtatcctgattgtggtggtggttgcatgactacacatacacaaaatcaactttactgtatgttaatttaaaaaataaaatgaaaaacacttctggaaaactataatcatttccaaatcttactggaatcatgtaccttcagcattttcctataatgcaaatggattactctgctaataaccttgaggacttatcaatccaaagccccaacacctccactcgaattgcttgagttacttgaatatttttgttatgatcagaaggtgtctgtaaacattaggattaactatatttttttctccaagatacttttctttcttcatcttattagcactacctaacccgtccggatctcactcccctttacagacacatttcacacatgggaagtctatcatactgcactgtaacctactgcttccttctttcaaatggttgagactaaactttatagctttcttacatgtccctcaacaaaccagtcatcatctcccttctgtactcagttgcgtcccttggcttgagcaatacatcctcccactacaaggcattatggtctagacaagacagcacttgcctgggtcttttccagactaagctaccaccaagggaatggggcagacatatgtatctcctaccttggaaaagagcttaatttttatagtttttcatggttgaggggaaacctaggataagctcattttacaaatgttgcaaagtggtttctattcttagaagctattgatttgaatataaaacaaagcagtgtttacattcaagacatttctcttggagaagcaatgtgtaacagtggggaaagcgctgagctgagaagccaatgatgttgtagcgttctggccctagctctaccattccccaaccagccatgcaaccagaagtcatcttccgatttcctcctcccaaagagctatggtgatgggtcctgtggcttactattctacaactgaagaaaggtcagagacattaggttctttgcatttggcatgttttccatatgtatctggtttccttgtgtatctggtcaaataaagaatttaagtgaaaatgtatatctcagccaggcacggtggctcatgctgtaatcccagcactttgggaggctgaggtgggcacatcacttgaggtcaggagtttgagaccagcctgggcaacatggtgaaaccccgtctctactaaaaatacaaaaattagccgggtgtggtggctcgtgcctgcagtcccagctacttgggagactgaggcagcagaatcacttgaacctgggggctgcagcggctgggttgctgggggagaggtgggcggaggttgcagtgagccgagactgcaccaccgcactccagcctgggtgagacagcgaaatctccgtctcaaaaaaaaaaggtatatcacgtaaactgaaaagtgctgtgcaaacgtaaagtattactataattccaaagttcttaacagaatacccacggtatcaaatcaatggtgcttccttgttttgcacccctagatgtgtagaatagttgcctcaaagttccaaattcctcatcattgttctggacacagattcacacttaaaatcaccttagggcaacgacaaccaatagacttaaggaaatctgatattttattccttatggcttacataggactttgcgattttcatgtaacaatcactaacagtggatggcactcaaaaaaccaaagtcaaaaatttggaagagtggggaggcagagtagacccagtctgtggatacccaggtggactcaggaatgcatgcaattaattaaaggccaattatctctgaaagagctcagactgatgcttggccagaggcttgttcaataagatggctcttatttcacatcagtgactatatcctgccagccgagaagggccagggtgagtgtcagcttctactggattttcgcattaagtcctgaccattgccgcttctcgggccccatcctcgctgggcaccggactctgtgtatatgttatgtaatctttctgtgctgcctttctctttgttcagtccatgccaagacccatataaaagaatccatatgtgattacagctataaaaccaagaggaaaatattagatgaaaatataacattttggggtttctaagtttgctttacctttaatgctaggcagacagtttacacaaatcattttgctgcaaagtaaagaataatgagttaaatgtgttccctgtcaccatcaatcatgtacatttgcttttgattcaccaaacatataagacacatgaaatgactttctaatcatgttgggggaaggagggagaagggaagaagatggggaaaggagtttcaacttcttttattttattcagaagatccgttgacattttctggcaatctatcttctaacatgctgtatgggcttctttttgctaataatgtttgccttgagaatttgtaaaggtctgagaacgctttaattcaatgttctagaaattaccagggccataggggaaatgaatccctgttaatagctcatggattacttctctctttattagaaatagttttcacagaagttactctactttcaggtgggcattagtgggcttggtcagactgagtggcactgcgggaggcagcatcctgcatggaagcctctgatctaatgggatctaagtagggtgaaaagcgggtacacagtgacgttgacccaaataggatactggggtttagcaaattcatttcaattcatgggtgtttattttgatttgtgaacttaaacaacacactgactggattttctggcagttgaagagctttataaccaaatctaaccagcctctgcacaatccttgtcaaggattaaagagctttgcatttcatgtttctacattgaatcaaagctctttaatttggcaagggaatcatatacagtagcaaagaaagaagttttctgcaccaaaatcacaccaaattacaagtccccgctggtcctggtcccacccagctgtctgtaatacaggctggtcaggctaggctgaggccaaccgatgcattcatttactccacaaacacgtattgagtagctattatgagtcaggcgctgttctaggcactgaggattcagcaagtagccccatcttcacagtgctcaccttgtcccagggaaaagaggcaataaacaccaaagagtgccacgggaaaaaacaaagccaagagagtaaataaggatgtggatgtatggtgtgtggagggggagggggtgcagattcctaaaatgcaattctgttttttccacatggaaacttcatcccccaatgaagctgagaagaacagctgtatacttcctagagaatatgaagtgggacatctactctctctagagaccctcacaagccccagagaacttgtatgagcttagttactttcttcctgattttcctgtatttgccagggaagttgttgaatcataaagtatccctttataagaaatataccatattcatagattggagaactcagtattgtggagatgtcaattctcccaagagaatccagaaacagacccgatcatgtagtatcacctgacttatttaaaaaaaaacagggggttctgggatatttgtaatgtactctttgttaatctaggtcctggttacatgagcactgagggtataagtatttaacaggttgtacatttattacatgcacacttttattatatttcaataaaaaattcatttttaatcccttttaaaaatgcagttctaatgccttagaggaaagactcaactgagaaattaatattaagcaaagacaacaagagttggacagaggggagccaagcagctgctcagggaaggaatatccagccagagggaacaagaagtaaaaatccctagaccagcccaagggagtgtggctaacataagaagcaggagaacactcaggacttaagccaatgaggttccagggacctgactgcttaggacctgcaggccattgtagggactttattcagatgagatgggaccccatggagagacttatgcagaagagtgacaggatctgattcatgcttgagaaggttgttctggatgctttgttgaagatagattggaggtggggtggtaagggcagagcagacagaccagttaggaggctggtgtaatattctaggagagacatgatggtggtttggagctagtagtaggagtgcaggtggtgagaagtgctccgattctgggaatattttgaaacttgaaccaagaggatttcctgctgtattgaatgtggtgtttgagggcaaataaataaatttttaaaaatgagtcaagggtgactccagagtttttagtttcagccatgggaaggatggcattgccaatagtaaaatgagcaaagaacaggtttgtggacaaagaaaaggaattcgattgtggaatggtaagtctgagaggagatggggtattcaaatgtaggtgttgagcagcagttgaatcggtgacgccgggttcaggggagaggttcttcatggaaatataaatatggaagtcatctatgtatctaaaagcaatgagaataattgagattatcaaggaagtgagtataattgtattgggagctgctctccactggtgaggaatatgtgcagaagtctgctgtcataatgccatctgtggttagggtgacattgtccatgggtaatagagtaagcaacatcttgcatctccctatctaatttccaccatgtgggtttactttgccagacaaactctctactctggtaccactagttgttctttcctaagtagagagccacctcaatcccagccttatcagttgcagccctggccccatttcagagctcttgtcaactccaaccctgccacgcaaggttgagttctgcttctggtatgcctccttcaacctggttagcagagcttacacccaccagacaataagaattgcttgctgtgatgattaatgttaacttgactgggtcacagtgtacccagatatttggctaaacattattctgggtgtgtctttgagggtggagggtgtttctgcatgagattaacatttgaatttgtggagtgagtaaagcagattgctcccccaacaaccctcaacccaacccatgtgggtgggcttcatctaacccactgaaggcctgaatagaataaaaaggaggagtaagggagaatttcctccctctgcctgatggtcagtcttaagctgggacatcagtctcctcctgccttcagatctagacttataccattgactttgctggttctcagattttcagactcagacagagactataccatcttctttcctgggtctccagtttatagagcttgggatttcccagccactataaccctgtgggccaattctttataatcaacatctctctctctctctctcacgcatgtgtgtgcacacacacacacagagacaccattgctctgtttctgtagagaaccctaatatacttactttgtcccagaagcacctacctaagtcatccccagcccttcagctccacttggtttagactccaattagtttcacctcctcaaaacagcagtgtgtgtcaatcccttcttgggagcctagttcattccttaccctgactcagcccagcctagggtaactgttatgatgcagtggcctctgcttttgcagagctgggcagacagaaaggtaaagaagatgcacagaatggagctatgcaaacatgtgcccatacatccaagtcagaacagaagctttctgaagcttaccagagcttcctagacctaaggatgctgatgggattagcgcactgtctggaacatggtaggtccccagggcatctctattgcatcaatagttcacatagaatgaactatagaaagctaagatttgtgctaagatgatggcactagctaaagttttcccttatcgtttctcacatttcctttcagtatactcaagggcaaacctggaaccagtttgcttgggtttgaacacctgagtttgtgaattccaaatcacacatccgcatgcaggttgttgaaattctcttaacccatagtgcctgccactgtaaaaggaggataataatagtgacaagtttgggtatggtcattgtgagaattaaatgtgatattgcagctaaagcacttaatacgggatttagcacatgggaatcagtattttttagctattattaaaagtccttgatttacatttttagctgctaaaccagactaattctatacatacatatgtacaagcacacatatacacataaacataacccagactaaaaatatttaaatgattcccttggctatggttagtgctaggacaaaaactttgtgtgtccagccatatccacttcagccaagatacaatctgaatagcatgcttctgatttctctagtgcattctcattcagaaacagaaaacatgacagagaagcgtgtattgttatcgatattaagtaacatttcacccgcaaattccaaatcttgcggcatagggaaaaaaaaacaacactagaaatacataacatattttcttcattctcaaaactgatttattcaacaaagaaataatcatggagagcatactgtgttccaggttttgtgtgtgtgtgtgtgtgtgtgtgtgtgtgtgtgtataaaatgatagattaacagacttcaaatagttggcaattctgagaactatttaaatgtgctacattggaagtcccaatgtacattgaaaaacaattttaagagttaatcaccctctaaacacacacacacacacacacacacacacacacacacacacacacacacaatttgtcatgtgcaaagacagctaatcctagtaagaatgatagcacaattcatgaagatggcaggccatgccccaacttgaaacctcatacgctgaagagaagctaagtatgcatagtaagactcaaaaacaaaaacaaaaacaaatcaatggatcttaaattacatccaagtgaggaagccaagtagagagtaagtgtggccacttattcagggctgaggcaatagcagataggctaagtaagttcattgcctgggtctttacagaagacagcagggagagtctcactagaacctgacaggctaggagtaggagatcagacagtggcaaatgaacagcatgttccagggctggctgatgatgtgaatgcagataagtcacaggcaccaggatgttcgtgcgaactccttaaaggaactcaagggttcaaataagatcctattgcacaaaatgcttaacctgtccttaacagcagctgctgagctggaggatccctggattgccagcttgagtctctttcctaaaggtattagatataaaattagcataagatttgttaaatcctagcactgcagaagctgtagagggcatgccttgaagtttaaatggagtaaattaaggacaaatagccagaaaaaaaatatttagcagtagttagcaaagttaagaaattcattacccccaaagatatgggggtatataaaatataaaaaagattcctaaaaagtttagatcaattcagagatatatccacataggagtgaggttttcagggacaaagacttagggtcctaaggttggtatctttgagagtggcattgatggagagataaagaagcattgctccatatttcttggtacctccaggctgggcctcttttgtaattcctgtatgccagtagtccctctttctttttctttcttttttggagacggggtcttctttctctgttgcccaggctggagtgcaatggcatgatcttggctcactgcgacctccgcctcctgggttcaagcaattccccggcttcagcttcttgagtagctgggactacaggcatgcgccaccaggcccagctaatttttgtatttttagtagaaaagggatttcaccatgttggccaggctggtctcgaactcctgacctcaggtgatccacctgccttggcctcccaaagtgcttatattacaggtgtgggccaacacacctggccagtaatccctctttcttttattaaacatatcacccccactttcagtcttggcattttggtctcatgcatgataaaatgcccagtggaagtggctcacacctatataatcccagcactttgggaggctgaggcaggaggattgcttgaacccaggagtttgagaccaacctagacaacacagggagactggtctctacaaaaaattaaaataaaattaaaaagcccagtggatagtcactgtgcttctgcctgtgccacatctttgctgttacagtcttgtttctcttattttaacaggggttctgccgcaccaaaaaacagacacgaccggcctaggggaagggagagggtgagctaacactttaccttggcttccagaaatgctaattgttcccaaaggatcaagtgctgccaaagcctcaccccttctttgtccatcctaataggcctgcttgtccccatggaaatattgatgaattctccgtcataggatacggaggtcattggagaaggaagcaatttctgtaaacaataatccatttgtaggtttacttttccacctaccccccacccccaacaaaagtaagtgagggctttgtgatccctggaatgggagataatacataaaacatgccaaggagggtgccattatggtgttcaccatgacctaaaggagacgaagatctgggatttggaggtaagtacacaaagatagcaatgtagaatggggagcatgtgaataaggcatctctattttagctgagaaaaatatatgaggggaaggcttgtgatttccaggtcatgtaccttagccaattccaacacaaagaccatctcagtgtcaaaaggtcatattcagagagctacttccaaacaggcgggaattggccttatacagaaataatgtggtaacataacccccagaggaaaatgtgttttcagttacaccagggccaggcccagcctttcccacaagctcttcctaaataggaacttggcaatgggattagctgagctggagcggacatccttggctttagaggtgaggcccatcagggtctggaggaaggttgggcagaggttttccctgctgctaatagcactgaagaatcagcatcacatccattttattaatttccttgacagacagctctagttaccatgcaggcaccacaaaatcaaaacatacgcatgtcaaggggccccatctgtggtggggccctgccaaagcccatgttacatcaacacgaggaagcagagcacagctccacacaccatgtgcttggtcccatgggccatgccctggaagaaaaccaccagagcttgattgaaagagccagagaagttctcgtggtgacagtcctttatcctgagtctgggcttttcatgttgaacataagatccctgggagacacgtggctacatctggcttcagggtctcgtctctaaacacagctacacagacctccctgccacctccattcagttccacccatgcaggatgagagcagcctggattaaagaagatacctaaaggaatgcaacatctttatttgtaagctggatctgagctcagagttctgctgagctgagacctttggctgcataatgagcataggaggattttttaaatcaaggtatcccttgctatcagtgttgctaaagtgattgaaggagctccaaagcaatttgttcctttatgtggagcaatgttaactatcagttggctacataatgccgatttggcaggtacgaaggataaggacttagaaaaactcctgctctaaataatatcactcataggtgcccaaggtgagcaccaatgcatctgtatcctcatgcttcccacccatccctcttattgcaacctaggccatttcctcaaaaccatcaaggaacttggcagtcaattaggtagccacatgacagcaaaaggcaggaggtctcatacctttgattgcagagcttccagcctcctttatggacctcgtgctgactcatgaactttctaaggatgtaatttcccaccttgccagctattaattctgctccttacatagtaagaggcaagatgtaagcccagatccagagctaactgcctcccatgccataacagaaaggctcaagctagacccgttttacacacgggtttgtcaccttgactgcctaatctaagaacagtctaaggatgaggactggagtgactgttatcccaggctccagaagcccccttgctagtggctgggcgatcaatgcaaggctctggaaacacaatcctaacctggcccaccctgggaggacagagtcggttttttttctctccttgcctgcactggtgcagcaggtatggccaccttggggactctggagtgtctgtccagccagctctgacaaggacatgaacacatccagaccgcctgtctctcggtgcaaagggcactgctgccgaggactcagtacattgtttcgctctccattcaaacaaccgcggcatgtcagtcctgctggcctccttgattgtgcagaaataaataaatgaattatgctgttggggtttgggcttcagcacaaacacatggtctgcatttatccacacagtgagaggtccaccagccacttgatataaaagagcaaaatgataattcttttctttaggcgctctgttgccatatggaatgtatataaatcatatttttgttttaacagcggaggctttgttgatagataaacatgtggtttatctaaaaaaagaggggattgtgctttgaacaatcatttaatggccgtggatgtgccaaataaaaataaaaacataattttgaaagaagttggcttcatgcccaaatccgtaacaaggaatttctccttaacccaagtggttagagcccgtcgatctgttttgagtttaagctgtgctctctactcaaccccacgacaaatggaatcccgagctaatgtgctctaataagacgagacgttacctttatgaatgacctcatggagaagaggttggcaagcatggtggagaggccttgagccaggcagctctgggctatgaagcccaacttcaactctgcgaggcagattgcgtcatcaccttctttccaattccagctcgggatgtttagcagatgggcctggggaaagaaaagcaggtatgagaccttgctctgttaaatgttcaattgtttaacatttcttctgggaaatgcagcattgcccaaccactcagggccatccagtcttgcccttcttttcccttgctgcggtctgatgtttgctgttttatgcaactcttctgctcatcacacttcagtctctctggactgttgcttctgcacccaccaagcccaagtcctcccctgggtttgtcatttagccaaatagagcccagagggaatttcctcttgtgacagacccaacagcctgggttactaggatgtctagctaaatcattaagttgagtcctctaatagaccgtaggagtgccaaatgcctgtatattttcagtttcttttttacctgcctttccaatactccagatcagtgactcccaggcatcaggagcgggcatcagaatcacctgtacagtttctgaaaacacagattgctggccccccaccagcatttctgattcagtagatctggggtaaggctggagaatttggcatttctcacaagttggaggtgacgctgacgctgttgatctaggggccacactttgagaaccactggcctaaaacatcaggtaaatcacagtgtcgacgtttccaatctcttgcaaatggactggtcctattcaacccttatgtcaggccctgagacaagaacccagaggcatgctcatccaattatttttaagtggcatgaagcagagagtcatagaaaatacattggatgaaagaatcaaagttcaaaaggttctccagagttggaaaaatcggcaaaagaccaaactaaaaagatttacaaggctttcatgtcaagtacagcatttaggctaaaaaaaatcaactatataaattcaaaatgagaagacctagcttggcagcaggcaggagagaaataaaagaaaacaaaacacacaaagctaaatttaagtgtgtgggtaactaaaacctcaaattttaggctagccatgtgacattacagagaaagccagtgtttactttttagaagtgctccccagatcaagggaaatgaacatttcattctgttgtgaattggtcagactagttccagagtacttgatccagttttcagtcagatttaaagagggaaaatgatcaactgaataacttccagagaaaagtgacaaagacaagaggaggtagcgtctggaaaagatcttttgaggaacagttaagacagccagtaatatttggcctgaagaaggctctcgtcctcacagagacaggatggttacatctgaatacttcaggtgctgctgtgtacaagattaggtttgtcctgctttgttctagaagccagaattaagactgactggtatatattccaagaaagcagatttttgtcttgttttataaatgaacttcctaaggatgtaatttgtctaccaaacggagaaggttaccttaaaaaatgaaaggtctttgtccctaagactcagtaagtatttctccaagttactatggaaagaacttttgctctgcactaggaggttgaatcagagagcccttctaagtctctgctagtgccaagattctatggctttgaagttattatttctctgcacatctcagcaaacacaaggagcaccaagggagcattcccttcactttcagaacaatatacaatagttgaactagaaggatggaagactccattgtgaaaacaaagagcaagtccaagggttccacactctgctttcaaaaatactattcttatgaaattccttcttgcaaaatccgcttctgtgacaatcttgtgcatcctaagccaaaagtgggtactccagggagagatgacagtgccctccctgatgagagcatggttaaatagtctcatggaggggccacagcaagtggtaattgctgtcaaactatcaaaggaccttccccacactgcagactcaattccaacaactagccctaccctttattccttcctctccctactctccagtggcttcagatggccactttcccttttacttcctgggcatcgtagagaacacattggtataactggagaaatactcacttgcagtaatatcatctgagaacctgagaggaatgaggagaaattcagtttaagtaatgaacaagtcaagcattgtgtgtgaaaggagatttttttggtccaagccctaaagagacagctctgaaccttcatggcaccttcaaacaaacaagcaaaacctttcagagaaagtctctcctatccgcatgtgctatctaaggtataaggctgaggcatttcatccttgggtcccccatggccctgtctggtttgagttctgtaggcatattttgagctttctttctcactgtccaccttgacacttggccatgtgattatatagaaaagttgagtttgttccttatctcagggttctgtgccctctttttttggatattatattttctccaacgcagggaaggagtgagggtgacctgctgaatgcttggagggaaatctctgtgcatgaaacaaagagaagagactgacccaggaacataaatcctttgtttctggaaacttcgtccttttccatttgaagtaaattgagtctgatgaaaaatgccagtgttagtgcccagaagtctggaggcaaatcctctctccctaacttggagaatataaagagcaggtctggcagacctggctgcccttcatttctgctacttcaccacccctccctcctctcatggagaaggaactggaaatacgctgtcctggaaaaccaggagagatggatttcagtcctagttccatctctcactacatacaattttgggaagccactatgaggaacaaagaaggccatgaaagaggaaacgatttaatacaattgcccaagtgtcagggtggacagtggaaaaaaaaagctcaaagaacttgcctctatctgcactgggctcatgggacttggcttccagagataaaggcctctttcactagagtctttgggaaaaataaaaaatccactgagaggtaaatcatcaggagtgatacttttccaagaagttataaaccaatctttccttgaagagctttgagccatttacactcaaatcagaagatgcagggccagcatttaaaagatggccagcatgaaagcgtttctctccaagaattctagtgatattaaaagatacactttggagagcatcagcccttctataatgcctactctcgggaaccacagtttggttcaatgggctgtggctccatttaaagagtcggtggcagtaagctcttctgtctccccgctcgctggctgcagagtggtggccatgatttgtgcccagcagagctgcgctgtctatacagagcttagatgccctgctctgaagttaccctgggatgctaaaatgcacagatggtccaacgagtactaaagaagataatggatgtcaaagctcttttaaaaccataaaatatgacacacatgtctacaattatgatgatgacaaactcagggccagttttacatggagagaaagtaggcagcttccctacatccctctaggccctagaatattactattactggatcataggggattgaaatgcttcatatttcaagcccgttgtccaattatgaaatcagctatctcttggaatatgttcatagtgacatgactttacaggcacataccaggtcctttcctgaaagcaaattgtaatgcatggagatctctaagcatctaggatgagtgcagcaaaaagtgccaagaaaggcagaaaaaaaatgttgaaagggaagaggaagaaaatgtattgaaagagtaggaaacatctcaggaaacacagcaaaactgtgaagcaaggtgaagaatgtccatttgcaattctacaaggaatgaaagacaaacaatgatgagtggacgttttcttctttctctagaagagagatatgaaagaacaacaacaacaaaatgccctgtgtcaaagtcactctattccctgtgtcctgactaatcatccaaggatctgtaagtgattctgcccaaccccaaaactcgaatagtttgggatggttctaaacaaaatgtgttttaagcaaataatcatgaattggttgatatcttcctcactgtttctgaataattacaacacagaggtttgccaaacacattcaggttgctatgatcatgtgattactgaccagggactgtctggatcccaggccggctgagctgctttgagttggacaataaccacagctaaaatcctccttaatttcttgaagatgctgcatcagcactcattggaaagagaaaaaaaaggaactgacaaccccttctaaacatacaacattaattttcctattcaatctaaattcagccaaaaatctaaacaacagcttaaagcactcccacactaaatgaaatttcagatcacaaatgaaagaaggagagctcgttgctgcaggagctgtcactagtcacagccttgctaataaaattcacctccacctacaagggctgccatcaaaaacttctccagcttgacacccgtacattaccaatatcctcactttatctcttcagtgtccttgggttttccagagacaaacaggcgaatgtgaccttgggtgcccaccaccaaatccgttggctggagaacaacacgttctgcaagggagccacctgccgagggctgggcagtggctggcagcagtcagccgttctggatggtgggccagtcactgacagcaggctccactcagtgacagcctctgatgggcctccacacagcaaaatgggccagcacttgccagcaattaagaaataacggcatggcactggtgcatttggcagaatggggtttttctctgcatcacctgactgcctatttcatagggaatatggcccataagagggggtacgctgttactcataacccagcagcgagttattctgtacagacaggacacctggctccaggtactgggcagcctccggtttctaggtttcattaaggacataactggtactgcatcaaatggagaaaggtgccaccttccctcccctaaagctgtttttttggaagtttattgactggctgagagaaggagcactgcctttgaatgagacactggactctggtttactgagaagtaatcacagggaaacagcatagactctgacttttgtcttctttctaatcaatcccccactgtaagctataacacaaggaaaattcctttctctttaatctctggatagcttactattttcctgattcaactctgcaaattctcatctcgactctgggaatgtgtcccacattacactcttacagagcgcattatgcactcactagttcacctggtctcagatagagaaatcctatcactcacttgcctggagcattctacaccttaactgctaaatccccgaggacacaaaatagggcttctccttcactgatattcctgtgggtgtcagggagagtgctaatcacacagtatgtattcaataaatatttactgaataagtaaatgactgcagcacatacaaataaaagttgttgtaacttaagtatggatgggatccaagagtaaatcaatagttctgaacctcgggttccaatagacacttcccgaatgaatgaatcagtacatgaaggagcatccttccagtgaccaaatgcaaacacgttgtttggactaaagaaatgggccagaggcgtggtggctcatgcctgtaatcccagcactttgggaggccgaggcgggcagatcacctgaggttgggagttcgagaccatcctgaccaacatgcagaaaccccatctctactaaaagtacaaaatcagcctggcatggtggcgcatgcctgtaatcccagctactcaagaggcagaggcaggagaattgcttgaacttgggaggtggaggttgtggggagtcaagatcatgccattgcactccagcctgggcaacaagagcaagactccatcccaaaaaaaaagaaagaaagaaagaaatgtcccaggaagatttttaacaatcacacctctttacccaggtctttgagttgcgcacatgtgggcatgtgagagtgtgtgtgtgtgtgtgtgtgtgtgtgtgtgtgtgagcctgtataatgaggaagaagaggctggacctgtggatgggtcttcagacctggagcgggctctcgcactcctaccttgttgtgatactgcagcatttgagtgatgattcttatcttcggatggtagttctttatggagattactctgaaaaagaaagaaccaatgctgagacaggtctgccttatgcatggtgtctgacaaaaagatcaattttactgtctccaaatggggtacccatgggactgaggtaggaggcaggacttgattccagaggcagggctcagataccagacaaaattgaagactagctgaaacagggatggggcagaagcaacttttcactggacaagcccagcagtgtgccctgtcagtttaccattgccatggcaacacccaggaggttccctataacctctaggccctagaacattactattactagatcataggggattgaaatgcttcatatttcaagcccgttgtccaattatgaaatcaactatctcttggaatatgttcatagtgacataactttacaggcacataccaggtcctttcctgaaagcaagttgtaatgcatggatgaattccagtcccagttccatctctcactacatacaatttggggaagccaccatgaggaacaaagaaggccatgaaagaggaaaccctttaatatgattgcctaagtgtctgggtggacagtgagaaagaaagctcaaagaacttgcttctatctgcactgggctcatgggacttgcctttctatggcaatgacccggtgacccagaagttactaccccttccctagaaatttttgcataagctgccccttaatctgcatgcaattaaaagtaggtataaatacgacagcctgcccagagctgctactctatggtgtagccccgctgtgcaggagcagtcacagagctgtaatactactgcttcaataaagctgtttccttctgccctaccatcagcttgcctttgaattcttttctgggggaagctaaaaaccttcatgggctaagccccattttggggctcacctatcctgcatcaggaccagcagccagggctatcctgaggggttgcagacactgggccaggttaaacagtattcccaccaccatatctcttgctagtgtgaaaacaaaatcacaaaacagccacagtctgtgtcctgggcatgaaaaatttgagggccccttggaatgcattggagatgggatgtatgcatgtgcgtactggggagtagggggcctggagcaggggctgccagcttattgcctacgtagacatcgaaagcgagcccaaatcatggggcctccagaggtttgcaatctcccacaccctagggactagcccagaaacaatctgctgagtccaattctccaagttaacaacttgagacaacaatgacaaatcaaacaagcaggatgacaaatggttctaattgtgacacatgcttggccactatcacaaaaaatgatttctaagcagggcttttaggatgagatcaaggactcagccttccatagctaatagagaaaatgatgacttaaacgctggttaaaaataagtgccaaggcattgcgggggtcatgatctggtggaaaattgtctcctacctgccctcagtccaaactcaatgttaagcatggcctgcacccaccccaggcctcacgtgtcctccccacatcaattatggtgctaaagggaggggcagagcgcagatgaatggaaacacgtgggttccagtcacagctattgtactaatgaactgcgcgacctttaggaaaaccctgggctctctgttcctgtttcctcatctggacactgggagcaacagtacctgctttatttacttcacaggcttggtatgagcagcaaatgggagaccagatgtgaaaatgctttgaaatcattaaaagttctctccacgtgtaagttatggtttttgtcattaccaagtctgtcagaagtgacattgtacatttccttctgtgacaaggaaggctaaagaatggaattccacagaaaggcccacctcctaagcctaatcagaaatgcaagtgcatttattatgaccacccccacaaacttcccacccagcagcgctccccacttcaccccttttagtgcagaaatggagagaaggcagccagggagcagctttatctgaaaagctgcaacgtacgaatttaggaaatggatcacgctaaagcctctcccagcacaaattcaccctgcgtttttgcacttgaaggatttcattttatttttgaaaaagtgttgcgttggcccacgcttataactcaaggactttgagcctctgtcagccctgccttgcagttcacagcttcagccagttttctgcattagctcatttcaaatggatctttgacattttaatttcaaaggaggcagattggtctcattaaactgaggaggaaggaggattatacaaataagagaaagacaaagcccatttttaaccctgaacttcccacttctttttgcagccaaggcctcagttctggctctacttaattacatttctgatactacctttgaccagtaatttctttttttcttttctttttttttttttttttttttttttttttttttttaagacggagcctcgctggctctgttgcccaggctgtagtgcagtggcgcgatcttggctcactgcaacctccgcctcctgggttcaagcgattcccctgcctcaacctcctgagtaactgggattacaggcacacaccaccacacccagctaagttttgtatttttagtagatacggggtttcaccatgttggtcaggctggtcttgaactcctgacctcgtgatctgcccaccttggcctcccaaagttctgggattacaggtgtaagccactgagccccgcccttgaccagtaatttctatgcctccttgtcctgccagtcaccctagtacctatgtgtcttcatattaaccctaccacagttagggtttaaataaaatactacaattaagagaaacacccatttcaaaactattactcaggtagccccaaacatctctgtggagtcaaaacattaagcttcatcttcttttggttttccatttggaattttgaagacagtgaagccaggttccttaaagggttacatttttttttttaaatcatttccaatgacagaaaaaggtgtcaaaagttgaaaatccttcctacttcaaagaaaggaacaagtgacacacccaaccctgatcctggtgtagccactgtgcagctgtaactgattcgggaatgagcccaggtgtgaagccagaatctgttccaccctctctctgcagcctggcaagcccaaagcttagaagagttcacgcatccacttccttaaaatgacctcactaagcatattgccaaagaaaactgagtggcaagagaagatggtgccagatgttgcctgccagacacaaggaccagatgcttaagggaggactggctcctctgaaatgcactggaggaattcccccacctcactgatggggaagctccggtcacttggggccactgatggaaagcaaagacaaaggcaatgcaaacattgtcaggatgtaaaggtaacttcttgaccttcaacctcaggtaagttcccaggaggcagtaaaccaagccaccggtagagggggaaccttcggcccgaaagatggctgttcacagttaggtaaaagttcctgggaatgcagtgggacggaaatcccactgaatttagctcaactctccagaagcttccctttatcatttcctctcagccctcttaactcttctgcaatttatgctacagaaaagacaaattccaaagggcctctaactacctggagcaaaataccttgactttttagtcatttcattgtcacacaatgtgactactgggtttatgcaaggaacaaaaactgaacaattgctttttttctgaattaagaaaagaataaggtgctggtgttggggccaatattagcagttgacaggcctaacccttgtgcacaaaaagcactgcacagtgtttcccagtatgacctcccctagatgttctgtaaaaaaaaaaaaaaaaaaaaaagggagggcagggcagggcagggcagggccacagcggcacactcctgtaatccagagttttgggatgcccaggtgggaggatcacttgaggttaggagttcgttgagatcagcctgggcaacatagcaagaccctgtccctactaaaaaaaaaaatctaaaaattggccatgtgtggtggcacattcctatagcctcggctacttgggaggctgaggtgagaggatcgtttgggctcaggagttcaaggttatagtgagctatgattgagtccctgcactccagcctgggcgatagtgcgagactctgtctctatgaaaaaaaacgggggggggttgggggaggtgggagaggagcagaggcttatagtcaaataggtttggaaagtgttctatagtacgttatctcagagatgcatattagtattaaaagcactgaaaagcctttcaagaaagaacattaattttgggaaactggatgaaacagcctaactggtcactaaattcccctttggggtgataggaatcaatatgccgtagacacacttggaaagccctagtaagggttttctcagcctcgacaccattaacattctgggccagacaattctctgttttgggggctgacctgtgcattgcagggtcgttcgcagtgtccctgggctctacctatcagatgccagcagcacggtcccctagttgtgacaaccaaaaacatctccagacattgcaaaatgtcccctgggggcatctgcctttagttaagatatctcaggcccatttcctttagggaacatggtactttaattcaggccagcacccatctcaatctatttcctagttctgtctcaaggaatctcaaacccaaggccagctgtaagccctagagctgccacctgctgagggtgagcttccggttggtgacaccctgtgtgccactgccccaacccacacagacagcctcggctcccccaggcctatgcagctggtgagttgtacagtggcttgtggggcaaaaaggcctcatagagatagtcctctgcagaagatccaaaagggccgtgaacagccacagactgccaagcccagggccttccgcagcgccccaagagttacctcatgatattcgaggcatcctccgcatccgggtcagcgcagtacttgttggcaaggatcaggcatgcatctgctgactctatctaagacaccgaaaggaaaattcacagaacacaaacatataaatagccatgctcgagtgtagtctctctctgttgacagcttcttggggaagctttgcaaagaaaaaaaaaaaacaatcctgagagcctgagagattatagtttttgtcaaaagtgtaggttccaagttcttgttatggtataaacatttcatcttgttgctgttggagggtacaacatgtaccttggtaattatacttttcatttggcatcgttgcttacttgtaggatttccagatttctttaaataacaattaattaagcctttcagtctcctccccacctcctttctcaaccatctgcaccatcatcctaattcttcctatcaggagttggaggtgggtgggttaaatcccttctctccagttagcaaggtaactgagtattggggattcagaaatgtacactctgaagtccttcatctgacctttttcacatcttcattttctataggctgggaagagatcagagctctaaatcagataacatcaccatattgcttagtatccgattagtattcagatattcagaagacaacaaatctatgtatgaaataatgtgttacagttgaactcaaaatatacctactgacttatccaaacacgagcccacaggggtttattccttagaggggaccatgagtttgatgtgctaatgattgcttgcatttaaattaggtccacgaacaataacaattgtccctacgttctcataagattttacataagcaataacttgagttatgtctggataatatcaagattaactggactctatgagcataagaattcttatgctggctcaggtctgcaatctgtcctacttggtatgttatacttaatagatcattcctggattttgagggaggccataatatcctccgtggtatgtcacaaatcatctctgatttctttaataatataaagaaagaatttatccaaatccttttggattattcatcttggccaattatattatttacaaaattatgcggtgaccacagttagcatttagacttcagtgaattcattatattaatgtacaccccctggcatgcaaatattgaacatgcttacaaaatctatattacataggtaaagtagcagatgccattttgccttgtacctttcccttctaagcctcaggtgtgctttatgagaagattctaaattaccagtttctggaaaaaaagattcgcccattatcaatgatatcagataactgcatgtttagttttacaccctgcgtcttagatggggaaaaaagaaagctcaaatgttttatcgcttagtaaaattttattttatattttagcctaatgtttctttcagatgtaaataatagaagtcagagctatattgagtccaacttaagtgttcaatataggaattacttgattattatgttgtataaagctactgggtccatataactggtctacttccttgatgagtagctgattttgaggaatccagcaaagcaagtttcatgttatgaccagtccaagtgtgggatggttataggtagtgttgcatatgccagcagaaggaggtcctgggaccagtggaagggtgacctcaaggttgctggtatgtgattgatctcattaggtgtttaggagatgactcgtggccaacctaggaggtgtgtcccctcagcacagagtcaggactccccccagacccacaccaagatggaataaaagcagaagtcacctcttcctccttaccttgactcttgcaagatcatgtggattgaggacggaaccctgataaaattccacctgagtaaaatgtcgtttgaacagagcttcaagctccaggttgggggagatgctacacagggagagaagaaatcgctattaatttaatggactcgggggtttcagcctccatgggctccttcctctctaatttccacagggagccctggggagaggctgtgacctacagtcacccttttgcttgccataaataaaagactcacactcaagagaagtaaaaccccagcccaactgaaaaccaaaccagtaccatggtaaaagaaagaggttcatgggctttaggaaggccaagacctcaggacaaatgtcttctcttcggtatgaatggaattcctatcttataaatatggaagctgggctgcgccactagtgggatggttcattttatgcggactgtgccagagggtgcccagatccagtgtgatttctgggtgtgtctgggagagtctctggatgagaatggcatttgaatcagtgaattcagtagactaccctcctttgtgggagtgggcatcatccagtcctttgagggtctgaagagaacaataaaacagaggacagaggcgtttgtcccttttgcttctttcctgccggcttgaactgggcatctcttgtcattctcctatccttggactggggttgacattggctctatgactctctggccctcagactcaaacaccaccagctttcctgggtctccagcttgctggtggcaggcagtgggacttcccagcctctgtaatcaaatgagccaattcttcctaataaatctctctagagatagatagatagatagatgtatcaatatatagataccgatatatatctgtattagatatattgatatatatatttcctattgactctgtttcactggagagccctgactaatacaatcaaggattagccgaaggttcccctgggagaggcatcctgctgttccctccatcatgaaccttatctctgcttctgtgtctcatggacttctcatcccccaaggcctggatcaaaaagtatcactctgaggagccacagacagacttaatttactctcattattgttcttgattcacacacatgtatgcgactcatcacatttcttggtgctgatctgtactgacatctttctctttggaggacaaggattaaacaagtgacctatttattcatttgttaattctgcagagatgaaaaagactgtcgataaggtaccgtgctaggcactgggagatgatatttagttagaacctactatacgccaggtaccgtgataagtcaacacttgcctaacatttgtgaagtccataatgacaataataataatagttcatgttttgtaacatttactatatggcagataacattttaaataaataatagtaaaatagtattataaataaataagtaaaataaataatatttatttattttattttattttacttagagtttatctctgtcacacagactgcagtgcagtggcaggatctctgctcactgcaacttcccaggttcaagtgatttttgtgcctcagccttcagagtagctgggattataggcatgtgccaccatgcccggctaatttttgtgttttcagtagacacagggttttgccacattggccaggctggtcttgaactcctggcctcaagtgagccacccaccttgccctcccaaagtgctgggattacaggcatgagccaccatgcctggccatgatgagcattaattcatttaaatctcaaaacaaccctataggcaggtatgttattaacccagagcttcaagaggttaattaactgggccatctactataagtatgacattgatggatgttagggatacaaaggtgaatcctagcaatggaagcatgagcagccagtttttgttttgttttgttttgttttgttttgttttttggagacagggactggagtgcagtggtgccatcttgactcactgcaacctctgcctctcaggatcaagtcatcctcccaccacagcctccagagtagcgagggctacaggcacgtgcccctatgcctggctaatctttctatttttgtatagatggggtctcactgtgttgcccaagctggtcttgaactcctgagctcaagtgatcttcccaccttggcctcccaaagtgctgggattacaagcatgagcaaccacaccttaccagcttgtttattcaaactaaagcagtggatgagagaaaagtggctgcctctgtgaatctgaccagtctttcagacccatgacaagtcatacctcattcagaagcctgcccgggtaataccatagactgatgctccttgaaagagatgtccccagtcacttctgccacctgatcaaaatgacttcagcatcccttggataacacagggttgatgttgtctctaatggttgcatgtgtgttcatcttgaaatgcccaactcatgtgggggcacagcctacacactatacctctagagaactttccaaaacgctcagtagaggatgggccacacagcaggtaatcagtggctaagcactgaatggaacctgtgggtacctgctcctgtgctaacatagcctggtctgttttttcaaagtttggagaaatcagtgcagaaaagagaaatgttggtgccccaacatggtgacaagtcagaagtctagcattctgtgagcaaatgccagaggacgacgatccaccaaacagggagtttgtagggaagccgacctcagtggaacctcagagtaggaccgcgtgctgggtagtcaacagcacgtcaagccagcacaaacatgttagctttgtcctggactttgcgatgtggtgccaggactggccccatgacagccccatctccataaaagaagatgaccatggtaccacacatgtcaccataatggagccccctaattctctccattcctggggcagactaccttttatctaaaaagaggattagtcaaagttgaaaacctcaacattgggtagaagggagataccttgctttcctcccctgtaaaacatacaagataagacctacctcctaagtggattatacaaccaaatatatgttatttttcaggctgatagctaacacttattgaagacttactgcacgcctgactctgctctgcacacttcatatggattaattcatttcattctcatcacagcccaactaggtaggaactactatcatctccatgatttatggatgaggaagctgaggcacagggagcttaagtaacttgctcagccagtagttggttgagtcaggattcagatcagggaatctgagtccagaatatgtatttttactctgtttgtggagtaaatgggagcctgcatgcacagtgacgggctagggtcccatgctgggggttcctaggaacggcagttgttattactattaccttctgtcctgcttcctcttaagttggtgtcttgcttggtcaccaactgactccagaactcctaacgtatccacaccatacagctaatcatcccacagcagataatgtggacacgccagattgctaaggggacaatgatgatgacttggacccacaatgagctccactattatttcttccagagataaactcggatgtggtcccagaatcgcctccacagaggcagactctgctctcatcattgaaccagtgtgttgcttccctttccattggttctgcaatatcttctccaacgaggccaaaagggatcatggcttacccaactctggccccatccccagtgccattccccaagacctccactcttacagacattcagggagtccctcgcagggtgtgtggttgggcagagggtctgacagcagtaggaagctcttacttgtgaagaaaaacgatctccacattgacgtcatcccggtccttgtgcagaaagtccttcaggaagttggaaacactctccagagtgatgtgtccgcagaccacaatgtgcctgaacaggagaggccagttagatcaggccaggcaccacgacaggaccctgcatcccaccccctggcaagacagcagaagccaggcagctgcaggggaagcattcatctcctccctccgcctccataaaagcccagctcccatccccagagggcagtgaggcaaagcagcggtgctagcaggtgctgagactcctagacagaaaagccatatggcttctcacctgatgctgcacaaaatcctattaaaagcccaactgtttggccaagtggttttatgcatttaacaataagtgacattatgcttgtgcttaaatgctgcattatcaagtcccttgcagattcatatctctccctttctgcccacaaagcgtcctccggggagatttactgtatgagtcttggtttatgacatagagcttatcaggtaatgagataacaaatcttgctgaaacgatgattttgtgtgtaagaaagcagacttttatcagggtggctaatgtgcggcctgacacgttataggttctgctggccataagcagtaaaaaggaaattttgcatttttccactataactcctccgacaatgggggcatgtaacactttacagtaagtgagcattactcagggctaaatggggctgggatgcctatggaatggaagatcatgccagctggctgtgcgtccccagagggctgcttccttagggtgcccgggatttccaggagagctaaaggaatttacctcaagatggggagatgctgggaagggatgaggctggaattgctcgccttgtttgagggtggtttggacttctgtttctggaagtagtggctcacccggaagagatgagccccacaactgttgagactgacagtccctccaaccgctcggggctcctggccaatctgactttggcaccaggcaatgtcatggccacttatatgtgccacataatgcccagtcaggagtgagcatttgatgcaagagtcagccacaagacaaaaagccagggactgactgtggagataaaaccactggcttctagtgaagagactgtatgtagcaagaggctcgactcctgtccctgtgccccccaggctcatagtgacagcatctgagtctctagctgcgctctgagacttgggcaggtggtgaacatgcagcatggtaatttcctgggtaaaatttagaatggccatgtcccttgcacttcataattgctctgtgcacattccactaaggcagaaagctcattggctggaggtggctcataataggaggcagtgatgatggcttatgcaatgttccattagatgccattataagagcctgccctttcgttgtaatttggtgcttgactaagtatgtgagaataatgcagtaaactcattggtgaaaggataatgatgcagaacaaagagtaaatcaataatatgcacgatgcagttaataatatcaccattatagactgttattgttacggtggtgcacttagcaatcaggcacgcagcggccaccaaggtgagggaagagtgtcaatgagctacttcagaagagatgtcttaacatgatcactttgctctcctgctaggttgatgaaggtcccttagccacccacccaaattttatgcccaaagcccatatgactaaccccctcattagtatatggtgagtagtatgaggctaagacagtgtgacacacagtgtatcagaatacacaatatagattgaacatttggatgatatgcattttatcatatattttaaaatgtttcttgtggcacatgtacatttacatggacaaaatacttcaaataaatttgcacgttctgaataagatttcagactttgaatttgccaaatatgtttgaagtgaatgagaaacagaattcccctactgacctaacttccttgcaactgacaatagggctactttgccattctaacatcctctgcacatagacttccaagattaggagcaaagccaacatgaatccaatgcgtgggtatctccacaggacagatacgtggctgaggctgttctcatcacttagatgtgaaagtaagccagatgtgattccctgctctgcgaccaagggtgtgggcaaagtatttattcccattcagtgcaggaggaagctgagaggttaataccacccagccggcctcctgtgccaggcattgtaaagttcgaagttctataccagcataagcctggttattactcaaagctaggctcaaatcaatgataggtctggggaaatgcctgaacattcgttcttcctacccagcatgcaaagaactgaatgaacatcagccagcatctcctcctcctctctgaaatcattcatccctaggaaagatgtgtgagaagtgcaaggggaaaagatgagttcccccctctcacccttgaatcaaaagctcagctggctgatttattcagccttagaaaaagtcagggttctcttccttgaaaatgtactgggtacatataaaatatattccaatgcaatcaatattatcccttaagcctttaattaactttcacttctcttaagaagtagacaaatgctggcaagagtgaggagaaaaaaaggattgacttttttcatttggtgctagctatccaataccattctagacaattgaaaatatatatcttttagccacagcatgatttctggggtggagagctgtctttatcaaaaaaggaagaaaaaaaaccttccttcaacgtaattggtatttttgctcagaaaaaaagcgagattgattgaaagcagattgcctttttgcccaaggagagttattaggtacattatcatggcaaccttggagaacccatattgttccaatctgtcctatatctgatttgaagatttatggcctcccccttttgtgccaataatcatttccctccattttgttttccatacagtgaaagttatcaaggagcccacatattgaaaatgtttgaatgcagttagaattgatggatggggagaagctgcctctaactcagcaatcggtattaggagatctgcttccgccagcctgtgtctgaggagggccctgcaagagcatgagggatggatggtgaatggggaacatttatttaccagaaatattttcaagacttttgaagattctagggccatagtttggggaaggatattattgcaggaagaagagaactagaatttattgcatcctcaattattagagatatcaacacaaatatgttaagatagacagcagggtgtgacctcattggaggcagagtaatggttgttcacagggcatgatttgaagaatgccaaaaaagatccccatccaaagttatctctgttgggttccatgatgcctacatatctaccatgtgagattcatactctgatagccctgtgttaactcagctcagacactaaataactaaatagtcttggacaatgtaccaattttgcattttacaattaaaaagccagagcctttgaggggccagagctggtgcctgattcatgaagttatcctgatatctaaggagatgatacatggaagggccaagtaatctgctccatggtaagcactatgaaatggtaagtgccatatggtatctgtaaattaggatgtaaccaatataaagtattctgtggcctatgcaatcccacctaatccttcaacaaccctgtgttctcactgcctgagtcttttcaggtaacctctctgaaactctttccttaagtcatatatgcctggcatcccacagcaagtaaaagtgacttgcccaggatgcaatctgggtctcccacttcagttcccactaagatgaaggtggtggtggaaaggaaagaggcttgtatatctcagcttctgctccttcagggcaagcagaaatggacccacagaggtcctcctggatacatggtggagggggtgttggaggggtcctccactggccaagggagaggtttagtctgggaactggagtggataaaccatcacagttttgcaagatcactagagtctggctggataggcagtatcatgatagtcttagcaaagtctgattacaggcagaaatcataagttccaccggtcaggaactctaagccaaacttaactgaagccatatgattggagcaagctaaggggctgcaaagtgatgcaaatgtccattttattttatattatattttatttattttttagagacagggtattgctctgttgcccaggctggagtacagtggctcaatcagaggtaattgcagccttgaactcccaggctgaagcgatcctcctgtcttaacttcctgggtagctgggactataggcatgccaccacagctggctaattttcttttggtttttgtagagataggttcttgctatgttgcccaggctggtcatgaactcccaacctcaagtgatctgctcaccttggcccccaaagtgctgagattacaggcatgagccaccgcgccctaccccaaatgtctattttagacatgtcatgtacagctcaggacttcctcaccagcctggaatctagaagataataagaatcttaatgatccatttacaatggggaatatttaggaaagttcagctatgagagtagctaaatctctccccatctgtggatgtggatctgaactttcttagaccatcagcgattgtcctgaccaatttctatagggcctgaccactcaatttgtgaagatgaccaatagtcctcaatcaataaccatttctgatctgatgaagtttttggttttaaatgctaggtctggatctgtaaacaaatatttcttgggcaaaggtaacataaaatagatataagctgacaggtcatggcttagaataaaagatccacctcagaaacacaaggaagcatcttcaatgccaaaatagtatccaacggcactttctggagaggaattattcatccagtgtgagcaagtagtgcctggtgctgggtcagggctccataaatatgggctggtttaactgaaaagggcagtgcggtgggtcacggcattggaggggtaagaatgacttcatgagaagaagtttgatgattatgaacactattgagggtcaccataaattcgccagttgcttatttcatgtgcatatcttcactaaatatacatgggtgtgcttctcctgccatttaagcatcgctgcctccagaatgaaatcccacaaattcttctcaatccttctactctcttctcagtgatgggccaggaaagcctgcatgcccaagttgagccagaacttcagtttcagagctcaattccacaggtacacaggacaacctaggggaagtgacttaaggcagaaggcagaagaggacaggagggcagtgactgaggcatcaagagagccactgaagatgacttttaggtctatgacaaggaaaatctacatacttttcccaagcctcagatactggttgttagagccagtagcctttgaaaagggaaactgtgaccatggaatagtcaccattgggccccctcccacgttcttaagtttatctcagcatctgaatgaatagcccttggcaattgtttaatctagcacctttcttctctttgatgtggaaacaggttgcaagatgagtgccagatccagagcacaacacctccctcagtttcatgccttctgatgaaagaaagcagctggtgccagggaggataacctaagctgggaattgggagactggggggcgagttctcagtgacctggggccagtcactaaaatgaagaggcccaggctgactgggctgcacccaccagacactgatgaatcctcacacagggctccagttctctgtccgaccttagttcacacctccatcataccttatctagacatctgcaatcgcttcctaactgatttccctatttactgtccccactgcccccaaccattcccacactccctcaaaaaagccaaagagaagggatggcagcaaatcctactgcgatcaggttctgcgagggcggggaggccttagatctttctttagcagagcctcgctctaggaagacaatgtaaaatgcacagctctgggctgtttatttttaaagatactatatccatttttactggaacgagtataaagaacttaaaaaacccagagctatcttgtcacaataaatcagacagagtaaattgaaaatcctatacagctttgcctgaatacattgtgctcactttgtcaaagaggtagatgaaatgtggcacatattgatctagatgtctctgtaaaactataatatttatatcaaatacatatgctagactctctgtctttctgctgagccttctaattgtgttttcctcgtcctgctcctcccaaaatgcatctcaccattggtagcccctgacatgatgggaatgaattttaagaagtacttctcaagagaaccagcagcactgtatcatacaggaagcagggcgtggggggttagagacccaacgacctaaaccacacagtggtcagcaccaaagcttcacgtttgcccccctaggttgaccttgaacccttggtgtctgcatcaccacctctccatgacactcctgcaagctggcctttcctttccttctcacctggtagtgcttttcttggctacttagtcttaatgcaggtttccctgatttggggcatgtccttcagggttactgtttcccagcgcttcccttgaggctcaatcccccactgccaaaaaataagactaatccaactcccaccttcccacttcctcctttactgaatgtctcaaagagactgacttcagtaaagataggggagacatcatgggcaaatgaagcctaactccaggctgtgctgcctcatccctccaccctaccccaggacctggcttggaacccccaaaacttgctgggctttcaggaactatttgttaactgatggattggttgacaaagtatgcatcttggagactctatcccatggtaagtgcagaaaaaagttaacaggtagttcactgcaagccttttagaccataggcttattccaccaccctgaatctactagcatatttcaagtttgtaagggatctgtacacataaagaaaaataaaaacaaagcaaatgagagtgtgtatcagtcccacaaccccaaaccctgactatcaccatttcctgttaaaataatttttttaaaaaaaaggaggttcagcaataagataatttcctatccatggacacatctagtactttgctaatcacaaaggaaggaaatgcattctccctcctagtgaggaagtgaataaagtaatcttcttctccagctgtcaatggagctgttctggatgtggcaggctgtgctgctgtttccctaaatggggcagaagtctgagcaaatagatcccaacagtgcagcaaaggcacctctaaagcagagccccaaggtcagaggacagacaactggcagccccagtggggaataccgggatgtcccacctgggccaaaactttgcatcttatcgcatgcagacagtcagaacctcagctaccctagagggatctgtgtctacacctccaccatcccaaatcacagttagacctccataattagaccgtggtgagaaatgatcacacatattttgtagcttgtagcctacatggagcctcagtccaagtctttaaattctgagaaactcagtgccggggacattggtagattttgcctgtcctgcatacaccctctcttctgtggacagcacctcattttaatttggggaattgctcctccccaaattaaatacagtctcccaattatatacagtcttgggacctttagtgaaggttttctgcccaagtgaggccaatgggtactcttaaatcttggatgggctgatgctaatcacagtgggagttgattcaacctgatgacaaaaccctgtaatgactactcccgagtttccacttcctcagtgtcagagctgcatctctggttcttttctgtcctttctgggatcttgctcttcagtttttcattggaatctctaaggtaccctaacctttaaaaaaaaaaaacaaaaaacttttcttcttaagtcagcaaaaaaataagtttctgttgcctgcaaccagagaatcctaactggtagacttgtttacctttactttggtttctcacctaattctcactgttacctagtatgcaagtattaccaccatttaggtttctttctctctcctttcctttctttccttccttcctctctggaaggggaattctgcagctttcttcagtaagcaattccacagttgctgaaccctcacaaactgcactgattcctcctatgcctccctccccaacaccctcacccctctgcatcttattcatcccattactttgggcttggtggcctttggccattttaaaataagcaagtcttcccttgacctgaatctcccaatgctagatggttctctgctcttacagagaaatcagggagctgaatggcactttccttttttcagatcaaagcagatttgcccgatttcatttttaatgctgcttctgtacaagcagagactgagagaagactaaggcaggcaaaggtcagcctcactcttcagggatgaaggtggaatagagggagaatgagtccaagcaaagaaatggctctgaattttgcccaggagagggttttgatttacaaagcgagccccacctccctccctaacacccctggtgaatcatgtatcatggtccttgagcacatactgttgggactgaccctcccataatgacaaccaacttgacatatctttgccttgttctccagccacacccaacggtgttgccacagctagcataagctgctagccattcactctgtagactcaacatacttgcataggccccagcagacctccagcatctgttagtcacacagggactggaaggagctacaggttagaaggctggcggatcacctgcggtcaggagttcgagaccagcctgaccaacatagagaaaccccgtctctactaaaaatacaaaattagctgggcatggtggcgtacgcctgtaatcccagctactcgaggggctgaggcaggagaattgcttgaatctgggaggtggaggttgtggtgagccaagattgcgccattgcactccagcctgggcaacaagagcaaaactccatctcaaaaaaaaaaaaaaagaaaaggaaaaaagtaaaaagaaggcatgatacgaggcatgacaggccacagcaggacctttgtggggtctggaaaggagtggacctcaggatcacatcagcggattcccaaccctcccaaatctttctgcacccctcttttactgggtctgtaagcttttaggtgaacaaggcaatctgctattacctatgctctccactgttcaatgggtatgttcaacaacgtgaattatcaaatgcttttgggaggcttccctctaatgtctcttgctttcatgattattgtacacttccatgatttcaatgaataaaattcctgaaaaaagagcatttcactgggaagacgctcctgcatactcaagcttctgtttcactgccactgtttccttgggtggtactgattggtcagaatctcagataagctccaggagagcaagaaccacattttacccacagcacatggtggggattcaaattattgtttgttgagccaatatgttagaatgggagttttcctaaggctgttctatacactagctgacatttgcctttggagtcaatggctaaggtcatataagctcccactgagatgggcacatatctatctctgaactgcccccatgtcctcttgttagaaaggtacaaggaggggagatagattacttttccagcaactggtacccatatttggaacagtccctgtggttctgggggtgacagcaggccattgtgatgcaacaccagtactggctgtggagactggaacccttgggacaagagaatcagatttccacaactctcacaatgtattgacctctataatgttttaataaaaagagacactggacttggccagttagaaagtttcctggtttagtttcatagtatgatgacagcagcatggaaggaaccccaaagctaccaggaaccattttgcacagctctggaaagaagtccagcagagtgaatgacatggtacgaagacagaaaacagggggcaacctagtctggatggctgcaattgttcctgagattctgaatctacccggcaaggattcacccaatcaaaggagccattgatcagaatcttcagcaattataatttgagaaatcatattcgaattattttttaatggaagaaagaatatttgagagtgaaaatctaggcttgaatacgactttttttttaaggtacacagttcatctcccacctacatttctattcttgttttcagaacaatagctggaacattttgctaagtgtgtggaagggaagagtgacagcaggaaaggaggggagcttcattctatcagtattatcaggaaattgatttaatatgcttccaagtctctttaaatagagcttcaagtttgaaagggactgaagatatggcttagaggaatccaaaacagatgccaagaaagaagtgcccatgtcccacgcccaccaagacccctctcatcaggaagggatacctagcacatcacatcagaagacatggcatctaatgacaagcgctttgggtatctacccctcagcaccacgtttcagaagtagtcaagaggtcatttttccaaagtattagggcaagctcattttttgttttccctgttcccaagaagtttaatgctaatcaaagcagaatgcctaatcagtccaagatgttctgtcaacttgaattatctatttgtcttcttatttactgtatctgtctgtctacagttcttcatatctttataaagatcggttattggggcctgtgtttccttctgactagaatcgctaccagatgatccttcctggtgatatgttgatgatttgctaatttatggcttttaaaatctaggaatccaaagacattgctgaggggttcaggctggggaagtcacgtggctcatgcaatgagggctgaatggctacttgatgagggatctaagtctgtgtaggatgcaaagcttcagtcacatttcgaccagagccatgtctgcaatagagaaatcgtaaatgacattttataggaaacacccctcatgagagcagtccgccccttgcaggcgaggaaaagtgagaatagctgttgcccaagacacaagtaaacatggaaagaaaaggcctgtggatcggcccaagtcagtataacatgaaatcatctcaaatccgattcccaagtgctagaggccatgccttcccagaaagagtcgagagggaaatggtgttgtagcaagactctctcagaaccaagagaagaggtttcaataagccctgatattggacttcccaaccacttaggtggccaaatagtacgatgtgtagctcagaaaagctgtggtatagttggagatttttatggatgtgtagaaatgcatctgtccccagtgcctggtagcaagccctcagtaaacacatgtggaatggatggacatgaaggcatgactcgtgttaattcctttaaggtagggtaggctatggggccatagattaaatgagtctttgtaaataaatgatccatgctctggcacactagacaatttaaaattccaaatcctttagaaatcagtctagaaccctggtggacaagacatgagtgtggtggaggaaatggagtggaattccacgttgatacaagacagccaggcaggagggaatagtgtgcgctctcaggaaggaacaaaggttctgagtgagaaggagagtccaaattctgatataaggaaagacacagagtttaaaaataacccaataatcaggaagcagggaagatacgcaggatgccatctcccgataagtcaagcaagcactgctcaggcaggttggggtctgagcgagcaatcagtttttaagacttcctctagtggaggtagaactgaagacctatgtttgcaagtggggcttgcataacctggattttaaaagcaagagtgttagctcccccagcttagtgggtaatgcaagctgggtcaaggtcattgaacaagcgttagttagcatctcctcctctgaggtgtcgcttccttggactactttatccagtgtaactaatccctgtttttctcagttgcagaatcttagtcttttctggttttgcagcacacattaaaaatgtgtaattggcatttgctttagttgtacccttgctcagtgcttgcaacctccttgagactgtaaactccaggaggacaggttccgagggtagtttgttcgccaatgaaccctgagcacccaacaaaacccagcatcatgcctgatgcataacacagagaatgcctgcctgccgagtgagtgaatgaaccgatggagaggggccacaggaatggacagtgaggcaggtcactaactgtgctgggctgtttttagttcttgaattttgttctcaactattgaatactcaattatttcttctaaagtatggaatcctctttaaaatatgagcatttacaataaagaagataattaagtactctagtttcatatttaaatagaaaagcatgacaaactgtccccatctctctgaatgtaaggctctttccaatgtggagaccacatccgaggttgaaggcagacagccctaactccctccagcgggatacaggctcctgagggtgaatattccaagtcaaagctatgaaacaaacacacagaatgcaccctgcagaactggtcacgtggggctctactgtgcctttcactgataaggaagaaaccacctccagatactgctctgtgctgtgcggcagactaactaaggagtgaaagggaacaggtggttccatctgcaagggtatagaaggctctgcaggtgagatctgcccagcagggaagtccaagtttagcagatcactacaattctccatggaactacctttaaaggatggagccaggaaggggaagaaaatgttgaaatccacaaaaaaggcacaattctcactttaggtgtggttcatctgtctgtccttgagagcctttcattgctagaagtgttcaagagggaattagaattctagtctaaccaaatgggaaaaataaaggaaggaatggttttgtcccctctccatctttttcccctcaatcctggggccaggacccttaggggtagtgggtgggcaggaggggagaggagacagccccaaagtgaagctcatgcctttctcttcctctccatcatgagcacggtactctggctccccttatacggaaaggtggaggaagatacaaacaataggagatcactgagtttagagcagaatggagtctcaagagatgacatggagaggcagcaggacgcagggaagcaggctgtccaggttcaaaccccagcccaactctttactagctgcgtgatgtcaggcaagttacttaacctccctgttcctcagtttcttcactcattccaaatggagatgatggtaatacctttctcacaggatcaatgtgaggattctgaaatatgcaaatatttgtaggtattactattgccagagaaggcagtcctggggctttaggctgcactgattcacattctcatttcaggaagtgtgtggcactcctgtctctataggcaaatgttccaagagaagccacagcatttaagtttcacaggcagctttcttgaattggagcaagagacgggttagtccatgacaactattccccaaaccagaatggcggctcagcagcttcatcctgaggaccttccttcaagttaattacactcactttcctctcccaccttggctacatctagtctttcatgactcattcccctctcgtgtgccctgtcagcatttggctaccaggaatcagtagaataatccaaacccatcccattctctctgtcccaaacacctgggcctaggattgcctcaaacttgagtcactcaagtcccaacatgggaaacacaaggtctgggtggctcccggctggactccctctaacaagggggttacagcagatggattcctctctgtgactgattattttccatggcccttggccatgtgaccttggaccacgatcttgtcagttctcataaactaaccaggagtggaatgaatcacactcagggaggagacctctgggggaaactgcaaggggctgtgagagggaggagagagctggggatcccaaaggccatgggagcgtcaccagccctcaggccttccctgtctctaagcagctttgaccttacacaaaggaaaggaggaggaggcagtggccttgggaggcaggctgggctgcaggagggctcccttatgaataagatttagggtatcagcccaagagcccagagagctctaatccctccaactcagagagattacctgcctcagctactcactgaacccttggttgtggacacccaaacccctattcttagatgctccaatccatcataacatacatgaaatagccaacacacacgcacatgtgcacaattacccatacctactgcagggactgggtatccttcaggaggtgatgaaaatgttgggtaaggcactctaggcccttgaaatagtgttgatggtgaagaggctttgagaatgctacttgaaatgtttatattatgccaaacacattgattaaaactgaaaatgaaatgccaatgaaatcttcatattctcaaatatcctgaatttgggtgttgtacaaacaaaaccctgatcttctctgcctaaattttgtactttaaataatctttgaatttcaaagttttatgtctctgtagctttagatcatgagttaccttgagttctctgacaagttaatatattgttagagaaatcatttctgaataaaatatgcacaagtaaacaaatcccttaactatgtatacattctaatttctttctgggcatttatttgattgggtcctggggagcagagaacatgtatgtgtgtgtccatgggcagagcacatggacttatgcatacacaaaaactcagagcacagcacactgttttaagagtctgaactttatctttcaacaaagtttagctgctttccttttgcaaatgcatttaattttatctggaaactttttgacgttagaaatagaacaactgtagtttctcattatgtttgctgccagaatccatgcttggttgctcaactaaagaccttatattgctaattactaccacatgcccatatcccaagcgaaagaaaacttattgattctgacagcccattctctcaacactgaattccaaatgaaaactcaaaatttggccaaacataacatttcatcaatcttgttttactgactggaaaaacaacatcaaacaaagggtgctaatggccctttattaccgtgcctttcccaagcttatattttctgatgaaagatctaagtgaccaaaggccttctttaaactacttagtaattagcttttgaaccaggaaacaatgcataaagtagtgaacaggcccggtgctgatgacaggacggactctgtgtctgcagggtcaggaacagtggggacccaaaaagaacattaaaagcaaagtgcattttcataaacggagaagaaaaaaaagagaaagagagagagagagagaaaaccaggctaaaagcggtgataaaagattacagagccagaacagagtggcaggaagtctgtgatctgaagtcatcagcacctgaaagtttgagtggaactgccagggtgaaagatgaccggatcggactgggggcagtgagtgagtgccgggctgagagccccatctgggtcagctggcaccgaaagctgccggcctccagcccacccaccagctcacccacatttgactaggaaaattatttcattaaaaaaaaaaaatcacctggaatgaaagtcaagaaatattttcaacttagccttcagggcaattgattttattgacttcttggggcagtgattgggaaatgctggcggagacgtcagaagatagggaggccataaagagagccccaggccctcagaatgccttctgctttatggagacctgtccacaccttcaaggcaaaatgaattgagatgctgttttcctcttggcatgggatacatgaccactgggaatctttggacttacttggccttttggatccaaccaatggcccagaaatcagaacagcttggttctaacctcatccagggctgttaagataatattgaggggagggctccattagagggaagatggagggatgtgctgcctcccggaaaagacgccaactggcctcctctggcccactgtcctttgtgcctttgaaaggaaacgggtgtcctgtgggtagttcaagaaaatgagcccttttgtccacctcctcatttcctgtgcagaggcctggacacctgagctcaggaagcactggactcactgaccaaaggggagggtccactctgtcccacacggctgactgtcaaaaagagaaggcagcagtggagggaaatacaatgctcccagtctgattttatttcctcttaaaaaaacaaaagaagctctttaagagttcatttgaaacagaacgagaagggaaaacaaaacaaaacaaaacagttccatgataggaacgtccatgactgggaagaggcatgagtgatgaaagttttctgtgtcctgatccggatggtaggatgatagtgactgggtgtgtacataggtacaagttcctcactttatatgttaaagatgtgtacatttaactctatgtaagttatacctcaaaaccaaaaacaaacaaaggtgactactccagaaaaagctttaaaaaaataaataaaggatggctgctgccagccccctctcccccatggcattctcctcttgaggttgtaaggtactgccctctacttaggaaaaaaccttggggtctctattgaacctgcacattgatatcgagagtgataaagtgatctgagcacacactaaaatagttcccgagaagaaagcattcacatttgggaagccaaacaaaagatttggcaggaatagcatgtagtaccctaaactaccagaaatatactatttcttgcccggaaggaatttcagctgagtaatgagtccctttgaggataagatcggtgcctcctggatgaagaggagaactgggttcccagtggccgcagtgcctttgcagtaggccagatgacctggatctgccacccaaggacttctctgccagagtcttatcctgtgttcttgctacacacaaaccaccataggagggcatcatactagtttgagggaccagaattttatcacatagccagatgatggaagaatgaacgagttttgtttacttgttaggggtcagaagagaaaatatgggcccagttataaatggactcctttcaggataaattcattacatctcttggaatttgtgaatgggagttggtccaagcgtggcaacgtcctcgggtcacctctgacatcacaccccatgcagaaactgggccttccctcacagaagcacccggtggggttggggaggggcagaattcagatggcacctccacagggactcctgaaagtcactcaaccacatcttttctgatgcaactgacttactttctgcctccatgtttgttaaaagtcccgccgaatttattccgactcaggatgagagcagcaatttcgggcacgtagcgggcaaacattgcctacatgcatgaaacaaagaaacaagagccaaaaaaaaaaaaaaatggcatgcagagaggattctaccgcagcagaggcagcaaaacctcttggcatacttactttcttccactaaccgcactataggagcccccgtatttcttgcggtttcctattaactctatgatttcagggacgtagctggcaaacatggcctgagaagataggagacagaagagagactaaaaagacaggccaaagaaaaggggggacctgttcagagggtgggggcactaagatctgaaaacacaaaaggattaggcctgcaaaggtatatattgatatgttggatcataaaaaactaaaagcacgaagagagcaagctcccagaaatacacaagacaaacaaacattggccaccttgacaactaaagaacaaaaaaaaatcacagtcgagaaaaatacaaaggcgacaggaataaataaggtgatatctagttcttcttgctgaagaaaaataggcaagagggggacatgctagtgaaactaaacacacacagacacatgtgtgcatgcacagacacacacagtttcgcaagagaagatcttcctttgtcattaaaattcagaggagaatcaatgcttttatgagtgacaaaagaaaataaacaccaaaagattaaaaactacatttttctattaaaaaaaaaaaaacactgaaaagctcaaaagggaaatttaggaaatcacctgggaggagaagatagcaaggagaaacacaaatctgccatgttttgtccaacaaacatctggcctgtggctggctggatgggtctttttatctataggcacctcacggatgctgtagaaatgcttgcgtgaatgtacacatgcatgtgcacatttatatacatttttaaaatgtataggccctatgcatacaaaacagagagaggtgtatgcatcactacatataaatgtgcgcacggtgtacatacatgaaagctgtgtatggattaggattttaatcactcgcttcataaatggcaaaaaaaaatctaaacttaaaatgagctactttgaaagacaaaatgcagcaactgccaacgtgtggccagaaatcccctcgatttacattagaaggggtggtttagtgcaacataaagagctgcgtagacttttaaaaagcaaacagtgaaactttcttagaagaaaggagcaaaaataccccatgtgtccgctgcagaatggagtgagctgtttgcaaaactgcactctgctcacatggggatgtccgcctggacaagactaaggtgctctctctcctttgatgtagggacccttctctttagggcaggccccagccacagtgtttgttggaagttaggggaggaacataaaggggaagggagagctcttgaaaccgcaaactgtctctacaaagtatcgacagcttctaccagaggcaggtgacagccactgtccttgtagcataccagatgctgagttacattgctaaggggtagacactctcccttattaacagcatcacttttcttaagacaattaggtttgctcctggctaaatggctgtccccgacaagggcaatgtgcctggatctatgggacaagtgtaatacaccaagaattatgcagaaaagtcaccatcgtgtttggatttacttagcctgattgtaacgttaaggcttgcttctagtgcagaatacagtctaaaatacaaagctttaaggaaatgtatcatggaaaatattaacagccatcaaaatcaacatcataataaagatttttttttaccagtcccccgaggatgaagaagaccatgaagaggcgcccaagtgtggtttttgcataaacatccccataaccaacggtggacattgtgaccatgagtaaatagacacattcccagtaggtgagagcctggttgttttggaaattttcccatgggtcccctgaattctccacctaaagcaaatgggacaggggagaaaaaagaaaaacatgctattgaagtgtatacatgcaataaacgcggaagctcggcactctcgaaggccacttgctactgcacaccactctccacacgagatgtgtggttcccgggctgagttctgtgagtcaggatgcagagctcctgagcaggacacagagaaagtggagaagcagctgcaggagatgtcttcctggctgattgagacagagagggaaagcaagaagggaaatatctctaggccttttctcttcttctggtaaaatgtgggaagccagctaaaattcagggcattgcctctggccaggttttagagcactctcttcaaggaaagagccagagattccgtccctgaccttcctcaatgggtttctaaggcccagatggcctggatctgcctctcccacagaaattctaaacacttccgtagggggctgcctccttccatcagtttatccaaagagtatatatgggccctgcttatttctgattcaaacagcatctctggaatctggccctgctctccctcctttgcaaattggcaatggtggtcccagccttgaggctgctggaatcttcacaggggcatggaaagtgagctcatgagaacagcttgcactggcacagcccgttagatcaagggctggcaaactttttcagttttgtgggcgacacaggtcctgttcaactctgcagaggcaaaacttcaacaaatgggtgtggctggatttggagagctttggcccgagactgcagtttccccactttcctgtccttccatcatatttgatctgccaacaaggctagtaggtgggcaggaaaggtactttagatactctcaggagagagggagctgcgggcccaattttactcaaatatgcctgtgatccacccacagggcctgtagacggtggcccccaggcctccacctctgcctctgcaaaatgtttccagggcctggcctctttcacacatcagtttgtcctcaatgtgccattttcacaaaagtttcctggtgaacctgaagggacttcactaatacccgtagtaaggtggggtcatcatcttattaaagacaactatctcctccacatatgtgatttgggtgcttcgtgcttggttacagcaagaattagggtgattaaggttgattttggccatgaatcccatcagcattaagggctgggcaggagactctagatctggtgactacgtgaggccccatgccccaaccactgccatcccaggcctgtcttcctttgggtgataattacctaaatcccaagtgtgggtagctaagcgcgtccttctatcccttatgcaaatagaggctcagccactggtggtcaactttatccaaagtctcagagctagacgaggctccttccagttgtaacagtctatgtttgcatgaaacacacttcccacaatggctgtgctctctaaaagcagggggaaagtctgccttcgggtggtgtgaggggcttgacttaatacaaggctttcaaagagtcactaatgaaaaagaatgaacatttttgaggtacaaatcagacaaaataatcaaaggtggcttttcgtaaggcggaagtggaaagaaattgagggatctgaatttgttgtttactaggaggtgtgggtccaacttccaaccttgtccccagaccttttccaggtgtttgcttaggaagcactgccatcttgtggcttactatagttattgcagacagaaggaaaatctaccaaagcccccatgacaataccaatgagcaatgaactgaaaaatgcaggttaatagtgcaaacattactcaccatttggaactagtttggggtaaaaaggttggaaacccagacaattgtgtggttgcttcccatcttcctgtctacaaccgaggtgaagttaatttccagcaagataaattttaggtaataaaatgactcagagagggtcttgttgcaggcaagcgagagcagaagggtcttcaaggttactcaccaaatggatgaacccggctgcagtcagccacgtgctgataaatatggagagcagattcaccagcttgatggaattactgtgcaagagacaacaagcaaaatccccacgttaccaagggaaggccctgctggggctgccttacagggtaacagcacccgcttagcaggagaggctgccacatctaactcccaaccatttctccattataagggaattctggaaggtggaggaagctgctgggatgaaggtcaggacagagcctagaggaacaaatttaactttggtaaaaattaacttttatttaaaaaactcttcaaatctacagaaaagtggaaagaacagtataatgaacacttgtacgctcttcatttagactgaccaattattaacattttaccacgggtgctttatctccctacatgctttttctcttatcccccccgcccttttttcttctcttcttcttgccatgtacatatatatatatatatatttgctaaaccatttaccaataaatcagagacatcatggcacaagccctaaatactttagcacccaactcctaagaagaagggcattgcacagcataatcacaataccattgcacgcctcagaaaattaaaacataaaaattcagtaatgctatttaatatgcagaccttatttaaatatctccagttgccccaaaattatgtttattgatttttttttattttccccccagacccaagtttcatgcactgcatttggctgttaggtggcttaaatccaactgtcaggaaacaaggacagagagtaaatattttaggctttacaggccatatagacattgtcacaaatactcaactctgtcactgtggcttcagagcagcttttggacatcatgtacaggaatagatatggctttgttccaataaaactttatttacaaaaacaggcagccggcatgggctatagtttgccaatcccagcttcagtcccttctaatgtataattgacaccactcctttgtaatgacattaaattttgtgtgaacctaggttgtcttctataatgttctatattctggatcctgtttatttacttatttatttttattttattttttattttttgagacgaggtctgactctgtcacccaggctggagtgcagtggcacggtcttggctcactgcaacctctgcctgccaggttcaagcaattctcctgccttagcctcccgagtagctgggattacaggcacccgccaccacgcccagctaatttttgtatttttagtagagatggagtttcaccatgttggccaggctgatctcgaactcttgacctcaggtgatctgcccgccttggcctcccaaagtgctaggattacaggtgtgatccaccgcgcccagcccagtttattttttaaataaatgttattgtgtatgtttgaggtttacaacatgatattacctaccatctcacatagttacgtttttgtgtgtgacaagagcagctaaaatctacatatttaacaaaaatcccaaataccatacaattttattagcaatagtcctcatgttgtacattagacctctagacttgatcatcctacatagctccctacttaagtatttctgttaagaatctcttcggggatggcatcacatcaggatatcccagcccaatgactagctccatccatgtggctaaggcagaaatgctaatgtctccactgagaggtgcccatttccctttgtaatgaatatgccaccttgagtgaggccccgagactgcaggaatatcctgctccccaaaaaccttatacctaatagctttagcattcactggtgttccttgagtggatcaactggaccttatgacattttgaggtccctaagagctgaggccttgtctgtctggattccaggagccctgggtccctggagcatagcagacccgtgactctgcactgagtgcactggtatctgcccctgctctctttctaaactgcatcctgttcagtcccactggggtatacctgaacgctgctgtcagcaggtcacttcactgtccaaaggcttcttgttgactaaaagatgacattcaaactctctccttccattgtcaacaccttgtgaagtcccagtctctcccaccacccctctttcacataaactcttgaaactgccatgccagctaaacctatttactatagctattgtttacactatttactcaacttgaaagcccttcccatctagtcaaatttccccattcttcaaagcccagttcaatccctactgcttccttaaagtcgttccatccatctgcaagacaaagtgactttccccggctctcaactccagccattcattggtaattgatcctactgacttaagatgtcttttgtaaagttttaggttgctatttgactcttgtgttccttgctgcatcttgcagaaaagaactctcttttctagctcttgcattttcccagtagtggcttaatgcagcctacagggttgcccaacccattagttttggtcagttcatctctgttatgactgccctctcttacctctcttttggagaaccaatgatttaaattctaggcatttaagatcacagtaatagtttcagctagcttgtttacagttctttcccagtgctcaccacatgtgccaccatcctaagtgctttaggatcacctgtgctttatgtatactaagtcatttaatgctcataacaacaatctttcttcttctatggaagagcacagaggaatccatagtcttagtttttccagagttgattctgacagttcatggaaagaataaacagattcaactttgtgggtgagactgatatttcaaaatgtgtggaacaactttcttctggctcgaaaacttggaaaaacagccaaaatgtccattctgtctctcttggtcatttctagagttaccagattataataattgccaatatttattgagcccttattatgtgttagatgttgtgttaagcagaattctctcctgcctgtaccttgtaagtcctctaaggtgtgctcccacattggagggtaagaaatagatgaagaactgatagccggcgacaaagggaggcctcttagggaggtgtgtgttgttcattttctcagggtatcgttaaataccaagtggcttcacttacatactcctggattcttgggacctgaacacagcagtgtcccaccaacaaccatgtagagtcctcttgagatattaaacctatttagagtctgagtctccttggtgctttggaaaaatgacctaaatatggtgattactaaactctaaatgatggttacagtgatattagtagtgcgttagggagctcttgccatatgcagaacatttaatcattgttgctaaaacagtccatgtttagctctgaaatctgattatttttatgacatcagtattatcacagatccctaggtttaggaatttgctttctaaatgaaactgtatgaccacacatctgaaagctacaagcaaaagatgcaaggttaacccctggtgggcattctccacagtctgaaatgtgaaccttgccaggttaagtagggctccttgggaagaaagagtgaggcacgccaggagcagggctgtgtgctctgcatagcaaaggttatatatctctgtgtggagatagtcatagccttcctggtcaagcccagggatctgggccaaacacgaagctaccagcggttagaatgatttgaaccattcagattctagcctgcttcctaagctttgagggagattatgatcttatcatcaacacctgatccaactaaagtcaatcattctcatgttgcctatacaattcctgagtctccatcccatgagttctaattcacatcgatggacacagtgaatcatgataggtcaggcacaggattcttgtagattagagacctcttccaagaaactgtggatgctgcaagagaaggtctggctccagagattacagctgtaaacccagagcttctggggcctcctttgtcctctatatgtttaacaagacatgtttcagttaacacagaaaatgccatgcactttgtacaaagaagtgtacgtttgtccctgttctgcttgtctctaatttttctctttgtttctggtactgccaggtgctgctggccttgtttgttttactgctctctttgctggacagatgtaaaatacccaccccctaaaaagttaactggactgcaccacactaacataaatggtctgaatgacaacatgagtggaacaaagtgaaattctgccaattcaatcccttaattatctctagatcccttcttctttctctgccccaatttgcactgcctaaggccatgccctaatacctcttccctggactactgcctcctaattggtcttatggtctatgaggtctttgatgcttcaaccccattctctatacaactgttggaatagtggatctttctaaaatgtcagtctaaccacatttcctctcctgattaaaatccttcaacagctctcatttgttctcagtaaagtccatgaatctaagaacctgcatgatttggcctctccctgcacatctcttgcagtctccatatagaatactcttctttacaaactttatcttggagccatttctaagttcatgtcagtagtaatgttttagtttcaaaaacgcctcccaaaaccatattggttaggtacacgatgactcatgcatatcatggaatgctatgtgagaaacaaaaggtgacatagtagatgtaatcattatctcaaagtagtgtgatgtggaggcaattttactttatcctatgtgattttgtgtgttgttgcaatgtttaccatgaacatattttcaaaattagaggaaacaggctgggcacagtggctcacacctgtaatcccagcactttgggaggccaaagtgggcagatcacctgaggtcaaaagttcgagaccagcgtggccaacacggtgaaaccctgtctctactaaaaatacaaaaagtagccaggtgtggtggcaggcacctgtaatcccagctactcgggaggctgaggcaggagaatggcttgaaccctggagacggaggttgcagtgagctgagatcacgcccagcctggacaacagagcaagagtctatctcaaaaaaaaaaaaaaaaaaaaaaaaaagaaaagaaaagaaaagaaaaattagaggaaacaataaggaaattcccattttggaaaaaattgctgagtgatccatgttttagtcatcaatatttaccacagtcaatgagatgtggaattacagcctttaaacacagctgctgactttcctctgacagtagaataagtgttctagcacctgtgtgttagatctccagtttgcagggcaactgagaaactgccaaaacctcagatagtgagagggagtctccttgtctcccctttaattggccgtttcaggctatggagtattctaggccccctatgggcttgcagtttgggaaagggccctgatgctggtcacataattgtgatttgcccatttcatcccatgcactttaattttccttctgctgcattcttaattctttatcaatctttctgcccaccttatgcttctctgccttatttctttcagctcttggcccagtgaggcagccaaagtactggaaatgaaacagcaactccaaatcattatttcaaattgcattgcaaagcctccatccctgcctaatgccacagattggcaggaattcaccgccaaagagagccagacaaaatctccctaaagacgattacatgggtcccccaacccacccttctggaaggaccgctatgaaagcagcagagtatggaagagtcacaggagaatcgctcaaaagtccaaaaccctacaaaagccaaggctgcactttctctgggacagaactttgggatccacacttggggatgcccaaaaggaaggagccaagattagccaggctggcacctggagagagaatggcctcagagagttgtcctaaagcttctagatttcttacaattacatgacgtttgcttctgtgcctggtgacctggcctttcctaccctcttaacctcatcctcctctttccatcacagaacgcttaatgtccaggagtgcagaattacccaaagtttccccaagtgttatgctctcacaccagtgtgctgttagcatcttccttgattagaagtcaacccccaccctacccctcacatgcccagccccatgaggatgacacttttttctacaaggcttacctaaaagtaaccttctcctcgaaaagatccttgactgccctgcaactcaggctaagcccagcttagttactcccctctcaacccctgggcatgctgacatcagcattaaccacaccgtcaggtggcctggccccctacgcagcaagttctctgacagcaggactcctagcatgcaccttgctgctgataccaatgggtgctcactccaggcttgctgaattatctcaaccatctggttatgaccataagtgaaaggaactctgaaaacccaggttgtgggtttgtggcaaaaagcaccctctaacaacaagagtttcatatagtgggaagtggggtgctggaaaaaggctgttttggggcccggatggcagatgcccagacagccttccaccccgtgactcttccctagggccattctctccctcgtcccctggctggctgcttcagcttccccgctctgcactgagagaggcagcactgagtgcagttggcaggtgagctgacaccagggatcccacagccacttcccgcatccaaaggaaagagaggtgagtgtcctagcagaaagtcagaaaaagatattcagatggtccatcattttctcaagttctaaaacggtccagggagtagacagtattcctcagagcaatggaaccttctcaaaatgctggcatcagagaataaaaatccccctaacatatgatgtaattgtgaaacagggagagacagacactacccaatgttagagagtgtcacaaaacaccatccctaccaaaaaagtaagtgtctcttaaggacaaggctctatgcttggtgctgggtactcacgcgttccatctttaaaacacagtctagtggagtgaatctgacatacgtaaatattggcgagatgctagcttcattgatcgtttacatttcaaaagtaatatgattctagcacatagaagaataattaaaaggcagaaatcaaggttattggcaatcagaaaaacatgaagaaatacaatattcactgtatgtgaataatattacattattgctaataaacagaggactgataaattcttatctcaggataatgaacagtaaaaggcaggaggacatacttttaaagacttcagtgccattggattctctttttcttttcaacttgactaatagaaagtgaatttgacctcacagtcacatagatgagcagtcagagagaggaaaccaatttggaattaaagcaaaataaaataaacaagcaaaaaaaacactaacacccaaggagtaaagccaatcataggttgaatttgttggctgtgtcaggttcattcaggaagctaggtcccagcctgtgttaccaggaaaatgatgctgaatctaatcctcaaaactacagatatattaattacaaatcacaaaatatggaggtgtcctgtttttaatcatttatcaaatgcatgaagggcaaccaaagaggaaatggaacattagaagttagcttcttagagtgtaatttcctagaagagaaatttatggcctgtacttattctccattagagcacgtctaacctcttttattagtttattcatcaagacagccttggtttcaggccagctctgcaagccggcaggtcatcaggaaagggatcctctgggggcttttcctcctggtccagttgtgttttccagatcataacgcagttaacagaagtattcatggtgcattcggcaggaggtttgtaggttttcccccaaaaggcaattcacagagaaagccccaagggctatacggatataaagtgaacatctaaaatgtgctttgaaatgaaatgattttctgtttgccgtatgaggtttgtgattgcctctcacagcattgcttctattgcctttacgactgggttcaatttcttatttagtgatgtaataaaggggcgatttagaatctggcagcaaggacttcccaatcaatgagcaaatctatccctcattcactgtgcacctttccccttgacaccgtggctcttatctgggcaaccccactgggcacacagatatcagctatgtgtccctaaaagtgtccctacttccctgcatgcacagctatttctctcttttcaccacatagttccctggccctgcagaagagagcaactcaaaccctactctggttttctctccctctctgtgttagatcactctttctgtgaataatataactattaataatgtcattgtgatgaaagcaagcacacctgatatttgcaacttggcataggggactggaatgaaaaaaatatgacgaagaacatcttaccttgttttaagaatattcagaaactgcaaaatttctgaaaactgtatcagtctcagagctcttaaaaatctcaaacctggaaaaaagaatgaaatagagatgcattattttcaatgtgtgattttaatgttcacagtctgccatttgatttacagttcccaagggtcgaagggatgggaagttcttgcagaagataaaccagctggtacctcagacatattccttcattctgattcttgactggtttaatctcgactgggaaatggactttctctttataaaggtggcctgtttggaacctctttagaggaagggctcatggggagaagccaggttaatgagacttttcatttggtgatctctgattgaaagcactgtttctaagttacctagttatctggcaggattttgtctctgaaaaatcctaggaattgtgatagctcagggtaacccttgtgctaagagcagattgagaataaatcggataaccttatgtctttgatggattttattttttatctttatcttcagccctgataaaatgaagagtacagcccacagtgttatctgttttctacaaacttctatattttcctcccaataaaaaaaaaaaaaagatcagtgagatatcacaccccacaacttcaggattcaaaatttatatagttccccttttattaagtgttaagataaatggtttgtcctttctaaatcaacaacctctcttgaatgaaaaagaagcatcagtgtttaggtggcagaagagagatggagaaggaaaacacatcaaggacattttaaaaatgcaaattattatgttttaatagctaagagtgaattatatttctgttcaggtgaaattcatggtcaaaacattcagtcagtcctgggctataataatttggctatcatgcaagggaattacttacaaaatgctggtttgtcaccgctttgagacacattgaatgtcacacccactcccaaggggattttcttttgcagactttctagaagcattttattaagcaccgccacgtgccaaaggcagtgcgaagccctccagtgcactgagttgacagacaactccacgcccgtgggtggggctttgttctcccacgcccgtgagccagtaaagggcagcctagggcacagtggtgggaaggaatccttactaccttctacttgaatgaggagtacactaactgcacgcaacgtggagctgtttaggtaataagggaaaattaacttaaagttcatggggtgggggaaaatctgtacaaggaaagagggagaaaaggattggctcaaaaaaataatttctcatctgaaaaggattaaccatcatgaacagaagactttttttgaaaacattctccttctatgctaaataatacttatataacttttattaaataattgcagagatgagacgggatgttgatgaaataaaaaggctcacggccaaaagcacagttgtaactgagctgatgaaaggctgacttagcaccgctgaaaaccgaccacggcgcagagtacaaaactaagaagtcacctcagaaagcagagaaaatatgagaaagggagaaaaaaaaaagatgaaacttcagaaaatagaaacacagtagaaatcacagagatccaacccatggataaaatgtgttggccaaagggaagtcaaaacatcacattgatcataagcaaaggccaggacataacagaaaagaacttttgagatatgaaaaaatgactggagactaaaaggtaaaatgaaggatcagttcttagagaccaatgccaagaagcatctggcttttcattttcacatttcaagtattaaaatcaagcaataaaaataaaccaccagtgttgatggggttatttaccgttaatgtaactaagatcattatatttaacaaaaagtgttggccgggcacggtggctcatgcctgtaatcccagcactttgggaggccgaggcgggaggatcacgaggtcaggagatcgagaccatcctggctaacacagtgaaaccccgtctctactaaaaaacacaaaaaaattagccgggcgtggtggcgggcgcctgtagtcccagctacgcgggaggctgaggcaggagaatggcgtgtacccgggaggcggagcttgcagtaagccgagatcgcgccactgcactccagcctgggcgacagagcgagactccgtctcaaaaaaaaaaaaaaaaaaaaaaaaaaaaaaaaaaaagtgttaaacagcaattgggcaattttcagaatttttagacaaacagaatttgacccaagatttttatacccagtcaagtggttgttcaagaataaaagtaacaaaaaaaatttcaaattctaaggtctcaaaaaatacattgtttgctcagtgtgtgcataaagtttccaaagaggttcacaagacttgctaaatcagaatgggagggggcaagggctggaaattaaatttataacagactctactgctggtcctaaccttccagcccaacctagactgttatctcataccagtatcactgtcgcatattgctgagctaaaacgacaaatgtagaaacgtggagtagaaggcgactggcagttagcactgaaactatgaaagataacaacactcttccatgttccttgagggatacattccaagacctcccagtggatgcctgaaacctcagatagtgccaaatcctatatgcattatatacacacacctacggtaaaatttaacttataaattagcacaggaagggattaacaatggcaataataaaatagaacaattatgacaatatgtaccagcatcactatacttgcgctttggggccgttattaagtaaaataagggttagttgaacacaggtaacatgggttacagcaagacatcggtctgcccactgaagtgccctgagagactaatggccagggagtgcagatggcacggatgtgctggacaaagggaggattcttgtcccagatggaaccaagcaggacagcatgcaacttaaacattatgaattgtttatttctagaatttcctatttaatattttcagactacggttgcctggggataactgaaacctcaggaagcaaaaccatagataagaggcactcctgtagaaatacatgctagcaatgtattagccatttagtgtttaatcctgaacattctgtgtgtgcatagatatgcttttatttatggaactaaaaatagaatacaaacaacctgaacttcaaactggatttcttctttttatctttaaacgatggtgtttgtatcgtatatccattgctgattggcagcttgccacatttgagtgagttacacaaatatagtagaataaaagcttttcttttaattaaggtgcatgaaagtaagggcaggaaagaaatgaatgcagaggccacaaggtcctatactcttgctagacacaaactgcagatctagctctgagcaccttcttaacaaaagcaagcaggcagacaggataagatcaatagtgtatacatatgagagaaaaacaaactggcttgcaggagaatcatttatttttcccaacatggagaccagagggaaatatctccttgcaaaagggacccagggtgatgcaggagcaagacccctgtgggctgaacaagggtggcctttgcttatttgactgcctcatactgggcatttttatggcactgagtttcactaatgcaaatgagccaatgaagttctccataggttaaaaaagtcagtctacatttcatcctcagatcaagccagactatctggagaaatggttggtctttcaggaatcattcacaatagcttccgtattagtccgttctcactctgctaataaagacatacccgagactgggtaatttataaaggaaagaggtttaattgactcaattccacagggctggagaagcctcaggaaacttacagtcatggcagaaggggaagcaaacacatcctacttcacatggtggcaggaaggagaagtgttgagcataagagggaaaagccccttataaaaccatcagatttcgtgagaactcactatcacgagaacagcagcatgggggtaactgcccccatgattcaattaccttccacagggcccctcctacaacataggggtattatgggaactacaattcaagatgagatttgggtagggacacagccaaaccatatcagcttcctaaccgctttctgccctggaccccttgtgttctctgctcagaagcctccaatgccacccattccacacagagtaaaagtcaaagtctttcaaaggcctaaagcaacaccatcccaccaccagcactatctccttttggatctgatggcttcctactgtcactcctactactgtccgctgatctggcagatgtcttcagtgacacttgaacacacaggtatgctactgccccagggcctctgcacatgcagcctctctgcctggaatgctgtttgccagatgcccacatggcatactccctcacctcctttgggttcttactcaatgtcccttgatcagcgtgactttccctggctacccgacctaaacatgcaactcctcccacaccacccgtgcaactccctatcctctttcctgcttcacttttctcctcagcatgaagcactagcacctcggttatgtggttactttctgccttcctctctttagcatcagctctatgaggggaggagctgatgtctgttttgttcagggctatatttccagcattgaacatagtgtctggcataaggtgaaggctcaataaatccttgtttgaactgaatgagtgaatcaaagttttgagaaataattagacggcggagttaaaggttagataatccacattcagaattctgagactatatgttgcctactaaagggaaaagccagaagccctgcggggtcccctgagagaggtcagggctgcactcttgggaagtagaaagtagcctcatcagggaaaagccttaacgaatgaccactctggctatacccagaaagagcccagaagactacagacagcgacttcaggctaagagaggagaccaagataagagaggtgagagggggaactctttggtgacaattattcatcttctctattttataatatcttttattatttttattctataaaatctctgaaataaatgattttctaaggtaacacaaaatagctataatagagttgtgaagaagaaaatgtgtatataccaaaagccaggaattacatgccctccccaaaagcttccaggttcagagagttttacaagtgagatttttacagtttcaaaaaatagtaacttctctatctattctctattatatgatcaattcttaaaaatggacttatctgtgtttttccatgctctgtattggtttagaaagttggcattacctggacacaagttcccttgcattttttcttaaatggcaagcttatcacactaatgactaacaacaataatcctaaataaaatactagggtatcatatccaagactgcattaaatgaataaaagacatgagctatagcagatgctgtagggtacagcccaaatcccctcttcagggaccttatttgtcctgggctcttgaagagtgacctgctaaaggctcagagctagtcccttcatgagaactgccctctgctacaaggagctgcctcacctggggctacatcccctgtcagtggtggtgccccccacccccccaccccccccccaccaccacacacaaatgctggctgatgtagggacaaaggtcagctgccttgcctcaatttgggatactttttcctgtgggatgggttgaggcttcccaggcagctgcagccagcctgagttctccacccttattccctcacaggcatgggcattaaatcctaccctggtgatctgcataccagaagaccgagcattctaagagtccatgtgggcatactggaggcactcagtaaatggtaatttcatcatatgaagaattacaatagcgtaggagtgtacacacgccacagaaaagtcatcaaactggactagaaagcccagaaacacacacacaaacacacacacacacacacacacacacacacacacacacacacacacacagagtacatatagtgttactattattttaaattactggtgaaatgatgatgttgacaatgacattaatctattattattgatgatatctagtatgtttatttacttacacacactaaaacttctaactatatcttttttaaaaaatacgtacacagaagaaaatagctaaggagacacaaatgagacagtgtatccagcatagtttgaaagcaacagagccaagtttcaccacaaatgtgacaaactccacaaagcccaagcttctagccactgccctgtacagacttcagccagtcatttccaattcagacattaggactcaagcacacactttcaagacttgtgatacatcttaccaacttgtcctcacaatttgcattcccttcagtatgcaaatgctcttttgcctgtattcccactggattgagtacagtgatagagaaaataggaaggaaggaaggaaggaaggaaagaaggcatgaaggcaagaagggagagaaggagagaaggcaggaaggcaggaaggcaggaggggaaagggagagaacgagggtaagaatcccaatttgaggtcgggcatggtggctcatgcctgttatcccagcactttgggaggctgaggtggactgatcacttgaggtcaggagttcgagaccagcctggccaacatggtaaaaccccgcctctaccaaaaatacaaaaaattaaccaagtgtggtggtatgtgcctgtaatcccagctacttgggaggctgaggcaggagaatcacttgaacctgggaggtggaagttgcagtgagccgagatctcgccactgcactccagcctgggctacagagtgagagtccatctcaaaaaaattaaaaatttaaaaattaaaaaaaaaatcctaatttgatagaccccaaataagagctcatggctgttttattttgcttttctatcttaacaaatgaagctaattattttttcatataattattagtcattttattttcttctctaaagtgctttagagtggcctttgccagtctgcctgtgtatttatcttaattgtagtaatacaattatgttctcatataaagaagattttgtataccatatattatctcccaccgttcgtcattcttctcaatttggcttaaagtatttttcctactgtcaaattttacttaaggtgggtttctttccccatgaattctaaaatatatcaatctttctaccatgttccctttttttaaaatttttttggccatccccatcatatagataatttttttttttttttttttactgcatctatttttttttctttgtacttttggggcactggttctggactttgactgtacatttaaatcacctgggaaacttttagaattgttgacacctgggtctcagcaccccctacctgcattctgatttaatgggcgtggggtacattcaggcagagggagtattaaggctccagagtgattctaatgagccatccaggttaagaagcattgcaaactttttctataaatgaacatatagtaaatattaataaatattttaggctgtcacaacgactcaactttgctgtaaataataggaaaacaaataggtgtgaccatattccagtaaaatgttattcatataaataggccatggacactaattttctacacttgctttggaggcatgggattcaaatccattgtgcacatgaatcacctggcatttgtaaacatccagattctgactcagtgggtctccgatggggcctgatactgtgcatttctaacaagctctaagctatcgtcaatgctgttggtcagaagaccacactttgggaaaacaaggctgcaaggcagtggtccccagatttctctgccattgcaatcacccgaggattttaaagcaatactgaggcctgcttcccaccagattcaacgggtctgggatacaagctgggcatcagaatttttataaattctgattcgagtgtgcagccaagtttgggaaccagtggttcagaatatattttcttttctctaacctttaatttgttaatctgttttgatgtatttatttattttggttaacagtgcaccaaaaggaccaagctttatttttctaatcaagaagattctaatgtacagccagatgatggatgaggatgagtccagtgtacagccaagtttgggaatcactgctttagagtatcttttattttctttttttaacctctaacttgttaatccatcaggatgtatttatttattttggctagtagtatgccaaaaggagaatgctttattttttctccaaatagcaaatttccgttaatccgagtaatcacttgagtaatttaaaaccagtaatctaccctctaagcacactaccagtctatttaaatcaattttaaagaacatactggctaactagaagttaaatcaataatacaataaaagattatttataaaacaaagcattcagcttaagattttgggggaaaagtagtcttgacaataggagaaagctgattttttagttcagtgtttatgactaaataaccagaaaaccaataaatatgaaaaaaaattttaaaaatctgtagaattttatgggagcaaacaatggcaacaagaaaacaaacaaaataaagttctggctgatccaataaaaaaagaaaaaaattatccacaatgatattctaataaatctgtgaaaaacctcagtgagagggatgactttctgaaaaatataaacttcgaaacttgatacacacaaaaaagaaatccattataggataacaattgagatatacattgaaatatatagtaacagcttcccttacagactctgcacccatatataatttatgattaaattattgcacatacattttattaaaattctaaactgttccataatacaaaacgagatctaaagctactaacttatattataaaataaacataaactgaggaccaaaaactgactctcaaagcacaaaaataaagtagaaatggccctcaacttacaatggttcaacttaatgattttctgacttttcagtggtgcaaaagtgatacctattcaccttaaaccatactctaagtattcacacaaccattctgtttttcactttcagtacagtattcaatacattacactaaattttcagcactttattataaaatatgctttgcgttagatgattttgcccaacagtaggtaatgtaagtgttctgagcatgtttaagatagggtaggctcagctgtgatgtttggtaggtgaggggtattaaatgcattctcaaacttaaaatattttcagtttatgatgggtttgtgaggatgtaactccatggttaaattgagaagcatctgtattctaatatcactaagatcatagatgccaaaattctgtatataataccaacataaattattcatcaatgaattaaaatgataatccagagcattctagttaaacatagcagatggatcacaatggtttatgtctgccccctctcaaaacttcactaaactaatacaaatgttgagggggtaggaaacagcagaatcccacaagaacaaaaagaatggaagaggagattacaacacagaacagacgaacacaaaatgtgggtagatactctgttagaaactgacttggcatacatatatatgtatttatttatatttatataaacatatacatatattttccatgtatatatttccataatgagaaagaaagacatatacacacacatatgtctatctccacaatgataaacagaatattaaaaatgtctttggtcaatacataaagactgaggttgatgggggggtggttgggatgcagagatcacagtgaagaagaaaacaaccatccaaaaggtgaaatgaagtggctgaccctgggaagaaggaggctgtgacaataacactgattgactggggtgccaaacaggagtagtcactacatggcagcaagtgcatacacttgaggtgttaaaatagagcaatatcctgagtaaactgtaactcttggaagaaacacactgtctctacagctgtaagaccagttaccgaatagaaacacacagtagcatatctcagtactccccagacaaactgcaacacacaaagacagcattcacatataggctaacagaagatctcaaatgcaaagataagcacaaaacaggccaagcacggtggctcatgcccgtcatctcagaactttgggaggctgagcaagactccatctccaaacaaaaaaacactgtcaagtacatctacatataaccacatggatgaatcacacaggcgtaacactgagagaacaaggcctgacacagagtcattctatataacccagttatatgaagttcaaaactgggcaaaactgatatatggtcaggagagtggttacctttgtggggtgtagtgactagaaggttgccaggagaagggactagggggtgacaggcaataatgactgtttcttgagctgagcgttggcttctcaaatgcattctcttcgtgaaaatttatccagctgttgccaggcacggtggctcatgcctgtaatcctagcactttgggaggctgaggcaggcggatcacttgaggtcaggagttcgagaccagcctggccaatatgatgaaaccccatctctactaaaaattcaaaaattagctgggcatggaggcaggcacctgtaatcccagctacttgggaggctgaggcaggagaatcgcttgaacccgggaggcaggggttgcagtgagctgagatcgcgccactgcactccaacctgggcaacagagcaagactcggtctcaaaaaaaaaaaaaaaaaagaaaagaaaagggaagaaaagaactaaagaattgccaaacatttgaggaaaggcaactttccttcaagaaatgcacatattacacttcaggccaactgacccttaaggatacaacattaacaaagcattaaacaaaaaatgctttagaaaaatatttgaaaaatataaagagttgtgaaaaactatctcaactcaaaaaatcaactaaatatcttagcaattaaaattttgaacatcaaaatcttaaaaggccagcttaatagaagaatgggcatagccacacagcaaagtagagggctgaactatcacacagccatcttcatacaaaggggcacaggaatgaaaagtgcaaaagaaaaactaagagacccagaaaacaggaataaagttttccacatccatgtaattgagctgccagaaggaaaaaatgaaggaaatagagaacaggaaacatttaaaataacattaaagtgtcctagaccgaaagaatgacctgtatcctcagattggaaaggtcttttaagtgtccagcaggttaaattttttttttttttttttttgagatggagtctggcactgttgcccaggctggagtgcagtggcgcgatctcggctcactgcaagctccgccccacggccagcagattacattttcaaagacctaaatccaagcatattgtggataaattttataacatcaatgtgaagaaataaatcccttcaaagcaacaagagtcaaattattgtcacaattctcctggcttcactggttgcaagaaaacaaaagaaggatatctttacaattctcaggacagattaatttgaaccaagtaatatatacttagccagttgaaagaaaaataaatccaaaagaagcaagatacaagaagcaacatggaaaagataaaagtaatggattcatttatgtgttgactgagtatgttttaaatgaataaataataacaatgatccaaaattaaaatctctggaaataaatggaagatggaggtgtgaaggagagagggcaatgggaaaaagaaaggtgtgcagaaattcttgtcttgataggatacaatcaatcatatatattaacagaaaaaaattaaagtatgtgtatcaaaaccttaaggatataaattccatagcctagagaaaaaaaaaaggacaaaggaatttaatcaaatggagaaaagaaaaaaagaacaaaaacttcagcccatccaatgaaaagaaaaaaaaaataaaaggtatattaatcagaaaacatagttacaatagcaaaagagtccaaatatatttgtaatcataataaaattaaattaaaattactttcacctatggaaagacagagattcacatgatatgaaaacaacaacaataataaattccaggcgcatgctatttaaaagacatacactgcaaacaagacatacagaaaagttagaaatgaaagaatggaaattatgtgcctggcaaatgctgagaaaagaggaacaaatagagcaatgactatatcaaataaagtggcagctactgcaaaaagttatataaaaattatatataaacattatattaaaaagaataaaaagtaatatctcatattgataaaagaaacaatccacaaagaatgtgtaacaaaaaaaaactttatacacctaaaagtattcctttgagataaataaagcaaatatgacaagaatgcacaaatataggacatttaagtagcatttaatcccttgggatatattcgtatctatatgtatctgaatggatgggcagaaagacacacacatatattagtaaactaggaacacacattctttaataacagccatgagcagtctcaaaaactgaccacatattaggccacaaagaaatttcatcaaaatctaaaatgcaaaaatcatctaagtcacatttaccacaaagcaatagaataagaaagtaataagagcatggcaacaatgactaagcagtagagaaatagactctattttatcagaagaattttacagacaataaagaggtcatcacaaatcaaaaggaagacaggcatcatgcaatgatggacctcataccataatggaaataagtttgagatgaattaaaaattaaatatagataataagggacagaaaaattgaggaaaatataggtatatattattagccctctgaaaagaagaatttctaatttcatgtgtaaaaggagtcatacaatctttgaaatacaggctctgccaccaccataaaaacgtcaaaattctgcatgtttaaaatcataataaacacaatatccaatgaaaaaataatcaaatatgatacaataaggataaattctttgtaatgtcaaaagcatgtatgtaaaatactttatcattagttgataagtaggcaaaaatcaaacagctacatcatgaagtagataatataactagtgaataatcattaaataaattaattaaatgaaactattttatcttaacttggttcaaataaaaaaaatgtgcaccatatacaaaaaccaactcacaatgaattaatgacttaagatccaaaactgtgaaactactagaagaaagtattgagaaagagccccatgacaacggtcagggcaataattttttggaaatgacccctaaaacacaggcaataaaagcaaaaatggacaaagaggattacatcaaactaaaaagcttggcccaacaaaagaaagaatcaaccgagtgaagagaggcggggcgcagtggctcacgcctgtaatcccagcactttgggaggccaaggcaggtggatcacaagatcaggagatcgagaccatcctggctaatacggtgaaaccccgtctctactaaaaatataaaaaattagccgggtgtggtggtgggcacctgtagtcccagctactcggcaggctgaggcaggagaatggcgtgaacccgggaggtggagattgcagtgagctgagatcatgccaccgcactccagcctgggagacagagcaagactctgtctcaaaaaaaaaaaaaaaaaaaaaaaaaaaaaaaggaagaaagaatcaacggagtgaagagacaacctacagaatgggagaaaaatatttgaaaactatacatctgataagggcttaatattcaaaatatatagagaacacatctcaatagcaagaaagcaaatagcccaattaagaaatgggcaaaggacctgaatagacatttcgcaaaagaagaaatgcaaatagccaacagtaaatgtttaaaatgtttgacatcactatttatcagggaagtgcaaattaaaactacaatgaactatcacttcacatctgttagaagggttattatcgaaaagacaaaaggttaagtgttggtgaggatgtgggaaaaaggaacccttgcatactgttgatgggaaggtaaattagtactattttccattatggaaaaaggtaaaaagtttccacaaaaacccaaaaatagaactaccatacaatcaagcaacctcaccactgggtatatattcagaggaaatgaaatcaacgtgctgaagagatgtctgcactcccatgttctttgcagcactattcacaatagccaaggtatgaaatcaaccgcagtgtccatcaacagatgaatgaagaaaatgtgatatatatacacaatggcatattattcagccaagaaaagaataaatcctttcatttgcaacaatgtggatgaacctaaagtttatattaagttaaataagccatgcacagaatgacaaacatcacgtgatctcactcatataaaacagctgatctcatagaaagaggggctggggcggttggagggaagggtggttgggtagatgttggtcaaaggatacaaaatttcagttaaataagagaaataagtttaagatatctactgtattacatggtgactatagttaataaccatatagtattcttgaaaaatgctttaaaaaattaaaagaaatgcaaattaaacaaaaataagtaagcactgtatttattctacttaatagcaacatatttgagcttcacctagtggagatgactctacaatgaaatagtcttataattccattgtggaattataaactgataaaaccttttcagaaagtaattcagcattattaatcaaagtaattccatttctgggaatatagcctaagaaaatataacaaaatatggaaatatgctacagaaacaaagatgctcattgcaaaattgttcattaagcaagaaaaatagaaagcagcttaaaatccaaaaataggtcttacgtctgatacatcttctttataggatattatatatgctcaaagattgtaacaaggaaaatttttgacataatgttaagttaaagaagtagaatgtcgaaattaaaatagcgattaccaggagctgaggggagaggaaaaattatttgtttaatgggtttagagtttcaactttgcaagatcaaaaagtactggagctctgttttgcaacaataggatatacttaacattactgaactgtacactaaaaataattaaaatggtaaattttatgttatgtgtttttcaccacaattttttaaaaatagcaaattggaaatgctgaaaaaaaaaaaaaagaagtaaaagatgaagtgcatggtccctatgataaaactatgaaaactataggtatgtgtaaaatgaaaaagtagaagaaaagcataaaatgatgacagtggccatgttacaaaggcagacattttggatttctttaatattcttgagttttttaatttttttgtaatatttatatcaaaatttctatttttatgcataattacttattgctgtagtcataaagtcagtggcaagtcaggactggaatacaggttttcctggctccgagccctgtactcacatgcaagattcagtcacatgagaccattggctccaggtgaggaggaccccctgccagagctttcccttcgaaacttgctgcccagggcctgaacaactaggtgaggctcctcctgagaactattgctgtggaattttagcaatgaccagacagattaagggatcttgaactcccttctcagataaaagcagagttactgtactgacagaaattgagggataaacaggtaaatgataactcattcactgcttcagggttcctgtgatccccagagagaaaagactctggagattcatacatgtgaggtctcgggagaggacaagacagaaaacacaacagcaaacacatccaagcccataccagaaagcctgccagggttttccaatttgctattttccattccctttcactccttaatctttaaatccaaaaagctgaaaggttccaataaacgtctgtcgtttccaatctctgcagccccacgcaaatcctgaagagcaattatttttgtggtgtctgacaaggtcattgttatctggccttgcagctcagagggatcaaactgagggcaggcatatcagggtaaacagaggatgcccaggagcatggggaggcttcttcagggtggtcccctgcacccttctgccatcacaggtcccacctcccatccccagcttggtcactgtgaggaccacctgcttcttagccccagcacagagtgaatctgagcctctccttcccagctggagaaaaaggactgtctcgcttcctctcaaatgcccctgggcttttgttcccacagtcagaatgtgtgttctataaacagttcttgcttgtctgaccttttcaccatcctttcctttggtaattgttcaggttgttttgctccctacttttttaaaaaaattttttgagacagggtcttactttgtcacccatgctggagtgcagtggcacgatcacagctcactacagcctcgacctcctgggctcaagtgatcctcccgcctcagccccccaagtagccagccaccatgcccagctaattttttctatttttttagtgacacagtttcaccatgttgccaatcctggctccctaccttaacccagtcctggttcctgttctgatagatgctcaacatcagttgatattcagactgggattgtcgcccattcattcattcattcattcacccacacacatgcacagagtcactgcttccaccaccccttgtggttccagatgctgcagcacaggggtgaggctcctgcttccaggtcttctatttgaatagaggagccagtaagtagagaaacacattttttaaaagtaaacaaataggacttactcactttacctctttactttgttttaaaattattgaattttttaagagacagtgtctcatggtcacccatcctggggtgcatgatcatagctcactggagtcttgacctcatgggctcaaatgatcctctcacctcagcctcccaacatgctgggattataggcataagccattttgcctggtctgactttacatcttaaatatatgtgaaataacttatcttttccctctccactgccagaaccatggttcacactgctgttacctccatctggaccaagagccccacacgggtcttcctgcttcacttctctaccccagtccccccaggccccaccagcattctccagaaagcagccagcatggtcttttcaaatatccatcagattacattgctccctgccaaaagccattacatggcatccatctcactaaaattactttcagattccttatctcgctctggaaggctctccatggtttctgctcatttcatcaccactctccatgtcctcacgccctgcacacagtgtctctgctccagaaacatttcccagttcgtcctcagctctgagtcttcccttctgtttcttttcttgggaatgttcttcccccagatcattgcaaggttggctaatggaggtcttctctgaccacccgatctggagcccagtccttcgccgccattatccattcttctttatagggtttaccacaatctaaaatgatctcatttgcttgttcaggtgcctgcctcctgcccgttcctcagcagactatctgctctattggggcaggtgtctcactcactggctcactaccaagtgcaccctcttctagaacagtgatgactggtacatagtgagtactcactactgaaaattaataaatgcattaatcctttcaaaggaaaagtaagaagggtattggatactaagttaaacccatggttttactcaattattcaacgttttctcaggaagtagtgtatgtgcccttagcttaataattccatcatttggtctcttctctctagtggctttaatcctgattctctccaaggccagatgttacagtacagagcagctcttctctgtgatgaagggagaggaaatataacaatctggccagctaattctagggttatagacacagaagcatgaatatttagattccaggcatttcagctgacagaaacattttatatcagttctaatgaaaaggattgactaggtttcacttattgcttgccaactggaattttgttaggcacaattacataatgcagaagtatttgagctgtgcctacccacatcagaatcctaaactaggtttcaaagggactacattccattttaaagaaattcctagtactgctaactttcctggaaataaaagctatccctccctaagactgacatttttatggccagaaatgtacatttaatctatttgttttaaactgtaatatattatggatgcctaaataaagccaaatgcctatcagaaagcagttgagaaaagaaaatctgcctagaaaactattcttatgatctctgctgggtaagaataaaaaagtaccacccaagacaggcaagaccacgctcccatggtcaaatgtaaggacagaaaatgagccacaactcgcactgtagcccctgaaaaaaaaattatcgataggtccaaatgcctcttccaaaaatgctgactcactgaaaattattgccatttaataaataggaagcaagctattacatcgtttgccaaactttctcccacatttctgaaatatattctttaatagctcaataacattcaggagcactagaggccagttaaattcatctaaaaaggaaggacgagatttctgcctcacccagcacatctgcgttgggtgggtatgccaagaaaacaggaatcaaggtggctatcacctctccactagacagttccccaaatccagcctagacggaaagcactttttttcccaggcagcctccaggaatacggaatacttttgggaggagaagagccatggacgggtgagtccttaccccaggatgcacaaacaccacagcaagacaccaatgactgccggaagttcggcggttcctccttctccggagcagcaggcccagacttcacccggtagccattatggaacaggtcccccagggacttcttgcggcgcctgccgggtctgtaaagctctgtgccggttctgctggatgggtggcggtacaccagaatcttactggggatcatggtagaaggagggagatgggctaggctttcggctcccttccattcacttcttgcaggagtcaatgctctggaaagacctggaggagcctgtgttcctctgacccgtgctgcaaacaggtcctcctgtccagcgcagtgtgggtcaccagcatctatgtcctggtggagccaatagacactctctcctccctcaccctccagtccctcttgcaagaaccccggcatgctctgggcactggatgcacgcagccacatcagaaaggcggttaagaggggcgggggaagcactctgatccacgatgtcctgcgagctgatcaatcagcttcacgctggaaataaccatgtaagctcctttggacatggtttagggggatagaaagagaaaaggctataattcctcaaatcaagtggtatagaatagagtgtgagagaggctgcagtttggggcccactaagtcgtttcttttattttagtaatcctgcttaacaactgaggactcataaggaggattcccttagaggatgtgatgcccaacaagaaagaaaaactgaattgtcctactcctcctgtcgtggccacctcccaccactaacataacccaaatacgcaaatcctctgctaatcctacatacaggactgaggaagaagagggattctgggctatccagaggaagatgggaggagacactcattagagctccttggcccaccccctgcttctttgtcccattgttttcagcatcttctctcattaccaaccccagccccctcttagttctctgttacaggctacattatggacccccatccctgccaaagtcgtaggttgaagcccaaaccccaatgtgatggtatttggagatgaggtactttagggagtgattaggtttagacaagatcatgaggatagggccctcatgatgagattagtgccattataagaagagagaccagagagtttgctctttctccctctctgccatgtcaggacacagtgagagggcagccgcctgcaagccagaaagagagccctcaccagaacctgaccatgctggaatgctgatctcagatgtccagctttcagaactgtgagaaaataaatctctgttatttcagccacccagtttttgatatcttgttaaggcagcccagagtgactatgaaagtctcccttcccagggtactgagtgtaaacaaaaatatgacacagacagagagaggggaaacattaaaaatataaacaggaaaatatccacattccacaagttgttagctgaggctcctcataatttaatccccacctattttttcagacctctagcaaggctaaaattattggtagaattttcaaagcataacatttcttctcaatgtggattagttcattcacctgaccatgacgtattgagcatctattatgtgccaagcgttttgctgggtactgggtatttgctgattaacaggaacaatgcacaagtccagccttggtggcatttatagtataatcagagagtgaaacaatatatcataactgtaattaacaatttggttaaagtgctgtaaagaaaaaccctaagtaggccgggcgcagtggctcatgcctgtaatcccagcactttgggaggccgaggcaggcggatcacaaggtcaggagatcgagaccattctggctaacacggtgaaaccctgtctctactaaaaaatacaaaaaaaaattagccgggcgtggtggcaggtgcctgtagtcccagctactcaggaggctgaggcaggagaatggcatgaacctgggaggtggagcttgcagtaagccaagatagtgccactgcactccagcctgggtgacagagggagactccatttaaaaaaaaaaaaagaaaagaaaagaaaaaaagaaaacaaaaaagaaaaaggaaaaaccccaagtagttatctgagtatgtgtatgtgtatgttacataaatgtgtatctgagtgaatgtgtatggaaaatgtgacatacatacgcaaaagggcttcacaataattctatatcctaatgatatagtagcagacagccaggtaaaaaaattatggtgatggcaatttttttaggccgagggaacagcatgacgaatatcttgaagagggaagtagatggcctggtcctgacttgaaagaaactcaatgtgtttaaaaagaaattggtgagaaactaactctccaacacctaaagttgtctggaaatgatagacagaactacaggtcctacaaacactaagaggataattttaaagtattaggaataatattatgtctccaaaacttgacaccctgatgaaatgaacaaattcctttaaaaatacaattttctccaactgacacaagaaaaaatagaaaatgtaaacagctacatatctgttaaataaatggaaacttcaatgaaaaacattcccacaaagaaaatttcaggttcaggcagtttccactgcagaattctaccaaatatttatggtggaaataataccaatattacacaaactctttcagggactggaggaaaagagaacccaacttgatttataatgccagaataatcatgacattgaaacctaataagagtattatgaaaagaaaaaaaattacagaaaaatatatgtcatcaacatagacacaacaatccttaaataaatactagtcaaatgaatccagcagtatataaaaagaataatactttagaatcgagtaaatagagtttatcccatgagtaaaagattggtttaaaaaatgaaaattaattaatgtaattcaccacattgaaaaattaaaagacaaatcatatgatcattttaataggcatcaaaaaataatgaaactatgttgtgttaagataatgtgtcgtgccccccaaaaagacaagttgattaatgaaacagagtccagaaatagacccatatatatacaatcaattgatttacaacaaaagcaccaatacaactcaatgagaaaaataaagtcatcgccacaaatggaaggaaaaatggatatctacaaagggaaagaaatcagtctcaactcttacctaacacaatctacaaaattagtttgagatggatcactgacttcaatgtaaaagctaaatctgaagcctctataaacaaacacagcagagtgtcttgaggacactcggataagcaaaggcttcttagataggacacaaaaggcactcacatttttaaaaagactgataaattaaatatcagtaaaataaaaaacttctcataaaaagacaataaattaaaagataagccacagattaagaggaaacacttgcagtacatttatatgacaaagaacttacagaaataaaaattaaaactacaacaagatggcaccacaaatccattagaatggctaaaatttaaaagttgacattatcaagtgttggtgaagaaacaaagcagctggcaccctcacacgttgctagtagaagtgtaaaatggtgtatcttcctttggaaaactggcagtttcttgtaatgttaaacatgcatctatcctatgacccagagactcaatttctaagtatttacccaagaaaaaaaaatatatgtccacaaaatcatttgtacaaggatgttcataacagctttattcaaaataagccaaagttggaaacaacctaatggccatcaacagggtggtttgataaacaaattgtggtatatcccataatggaatattagcagcaataaaatggaagaaattattaatatatacaacaatatatacaaatatcaaaaaccttattttgaaggaaaggagctagttagaaaagtgaataccctgcatgattccattcatacaaaaattgagagcagacaagactaatctatagtgattgaagccaagatagtgatttttttatgttcaagggaggagagagcagatattgacagaaatgagcataaagaaacattccaggatagtaaaaatgttctctatgttgatatggatgacagaccattttacagtggtgcatatctctgtcagaactcactgaatgcaccctcaggatctatgcattttattgcatgtataatatacttattaaaaacattgagatgggctgccatgttagatggtatctccctgtcaacagagatactcaaacagagtctgcttgtaccaatttagggaacactaaagtttcacctgatgcctaaacagagatcatctgctgtaaccctgtaaattccctcccaacttccagtgggcagtatggcatgaaacccctgcaactcagagatggctggtttaattggagaagtgaaggatttgtattcaggctctgccaccagcagctgcacatctgagtaagttatgtaactcctagcctcatttcctcatctccgaaatagggattatgacatctacttcacagacgaactatccagattaaagaaaacgatgtttgcaaagctctgcacagggtctgacactcagcaaattctcctccaaaaatctgccaaagcactagggcccagtcaaactggtctatattctgccatcgaatgccccatcatcactgggcaatctggtctcctactgtaaataaaaaccccacctatctccatggggcacatctgccagcctcttcctaggaccctgtaggtgtggcaataaatgtggtccctggaaccagcagcaggggatttggttcctggcatctccacatacgagccacatgctcttggaagttattccaaccctgcctcaagtctctgacttttaaaatgggaaacacttttcaagataaatctgttcatcacaagaaaggatttcttataaatttgaaatatttaaaagagaattctatgcaaacgtatgcacacatacaagtgaatgtgggcccatttctctggacatgtgtctattccaaaaaaaactgtcataaactgtatcctcattttgcactcctcccaccagtgtgtcccatggtgccacctggtattgtctgcctgaaagaattctaggagggcttcatttgtctctgaagtcatagatcttcatctaccaatactgggaaaactcccttgctcctcttcctctgcattaggcttgtttttctgagacagaagtggtcagagaaaaaggacactggaatccattcattcatttaaaaatattgaccaagaaatgaactcagacgaaattgacctcttcagtgaagtcatatctaattccctcaaccctgtacaaagtaatagtacatttattcaacaacatattttcatggagtacctatttagaaaagagacggaatctgggcccagtgttataggattcaaatcccagctctgccattaattgggagtgagcattagcaagttccttcaactcaaagtatctcagtttccccaactataaaatgggaacagtaatagtaacctacctcatggggttattgtgaggaatgaattaatatctataacggttaaaattgtccttggcacataggaaatgttcagtcagtgcttgctataattattactaggagccagatactgggctaaccatattggggatacaaatgtgatttgctctaaatctatcctcaaaaaatgtacagtcttgaggagctgtttacaatctacatttgtatttagctaagataggaaagatgactatctacataattttaggggacgatccaccagcccccaaaagaaattagccttcttctcttccttgtttattgatgcctaaaattcccccataagacagcagcattacccagtaagaaaaaactgtgccttgggttcaaatggatgtaagttttgaccctggctctgctcctgatgcactgagagaccctggctgcttatatgaaacctgaatgtctatgactgcatgtaaaaaataaagatgagaagctgggcgcggtggctcatgcctgtaatcccagcactttgggaggccaaggcaggcagataggttgaggccaggagtttgagaccagcctagtcaacatggcaaaacttcgtctcttctaaaaaatacaaaaattagccaggcgtggtggcctgcacctgtagtcccagctactggggaggctgaagcaggagaatcacttgaacccaggaggtggaggttgcagtgagcggagatggtgccactacactccagcctgggtgacagagcaagacttcatctcaaaaaaaaaaaaaaaaaaaaaaaaaaaaagaaagaaagaaggaaagaaaaaagatgagaattatgcctctcaggggctgtgacaataaattgatctacgtgtgttttaaaatgcctttcacacagaatatgctacataatcactcattcctggtctcctccagaagtccctgcacttggcctctctctctcgggtgtaatggattggtccccattgaaatacatttccttttcagagtcatttatccctcagttagaaagaagtattgaccatggggaagggggactgtgaagccacctgggcatggcagagggggccaggcacagaggagggagcacaaaagaacgaacaatgaagcacatagagaaataaaacctaactcgacttgcaagccagtgatggccctatttttagctgacaagtgagtaatctgatgtgtgtgacttgaaacagggaacataaacatcaaggctgaatctataaccagccacatataacttgtactataacttattcccagaattctagactgtttgaattaagtgtctgcaggtctcttcttcacgcacttactcttattaagtttgggaactagaagcctgtgtcatttgcacaggtctcaagttacaagggaaaaagatgctttgcttggtctctggtttgactattccaaagaatctttcctaatctccaattcgtctttgtctcccaccccaccagcctccctccctccttcccttccccctgaaagctaaccatcagaggggtggaatagcctctaattcagcccattcttccctcatccctttccctttcatcatcagctagcagtgaaagtcaccatcctcttggacctcccatttctgaggcattgtctgtcccagaaccccatgcaggacattggagacaagtgaatctaacctcgtccaatctccctcttcttcccgtagataaaaacctgaactcaaagaagagaactggaataatcctcccttatcccacttcccatggtgagccccagctgggacgctgacacatggccccaacttttcctcctgcctgatgtctggacccacaggggacagatggtggtccctggtcactgaagtacccacaggtttgattattgagacttttatctctgttgactacagggaggacctgaatcagtttacatggttaaaataaaagcgccatatacaaggataaagcaggacagggcccccaccatctaaaagtagaagggatggggattgccaggcagcacctgccaccaccaagaaaagactgagaaagggacacttcaggcacaacatgtaaggaggtgctccttttgggactgaccctgcctttgcatagccctgggaatgagccaccctcatgtttgcacccaggcctctctcttgcctcatcctgcacctgccatgagtttactactgagctcacttctgaaattggctctgcattgcctgtcacctatggcaagagagaaacaactaggttatgactattgtgaactgagaaaacctataaagccaattcagagatcaaatctatcctaaaattaaattcaagcagaatttttgtgccagcggctttgaataaagactgaagaacacggtgagttatatcttcaattacagtttacaaagaacagaggtactccttccaaaaggggactcttgatttagctctctgtaaggacagaaagcataacactgaatcttgggtcagcaaaaacattttcacaagggcctcaggtatcatgagatttagctctgtttaattctgatgctcaacattaatttaaggaaaatgaagtacttgttttgggggggattaatttgctaccaggcacacctcagctgtgttttattctgaagctctaaattagcaccaggatcaacctggataatctaaatcaggggttgccaatttttttctgtaaagggccagatcataaatattttgggctttgtaagctgcacaatctctattgcaagtgctcaatgcggccattggagtgagaaaactagccacagatgatacaaaaatgaatgagcttggcctcgttccagtaaaactttccttacaaaaataggtgatggaccagatgtagcctgtaggccatagttggtcaacctctgatgtagctgacatcttgaaatgaggaaggaatgtttaatttgagaacaggtacttctacatttcacaaggtagaaatctgtaaataacaacatttggaagttccttctgtttcctgcaacactcactttagaacctaatatcatgctatttttattgctctggcttaattcagttatatagaaatcatttctattcaaatagacgatgaaatccttgaggtcaaggtctctgtccaacttctttgggtataatccatcgtgcctagcacagctgggaactttgcacttgcttaaagtgttttcttccctttctgaaggacagtgattcacatctctgcttttgacatgcaaggacttgacgatctatttaacctaaggggagaagagtctctttcaaagaatggattgtcatccccttctccctgcccctgccatgtacattatgcttctaatcagtctggaataaagcgatgtcatgggcataaactaatttcttccaatccaaaacaagttagcaagtctcattttgtaattctaaagtcttcagctcatgtatttatttcaacatttttttcctataaataaatggctgtgtgacttgtctccttctttgtgttcatatcccaatgtccagtgtagagtggccttcactaaatatgtgtagaaggaatgaggaaatgaatgcaagatgggcttagctcataaaccctttgttttgttagagacttttgccaactcttttaggcagttacaatattttgatgggcaagacctgtgctgttgggctgcctggtcaaacccatgcatagtgaaataatccgtctccaatctcagcctgcatcctaaccccaatttgtccctgagtgcaaggtcactgatctgaatttgaatggcaggctttgttgacctaacaactctgttaggctcacccatttctgcatactactggtgagtgacagaggatggacactgaaatctccatcttttcatagaacccatgcaagaggcacaaaaccatctgcttagtggtcatgtggcagcagacagtatctcagaagtcctcgcagcatatgacttcactgatgaagatggatcacacttgagcagggattcttgatctctgcaaaacagctcatacacaacaggaacaatctcacagataagaaaaactccagaagttggtctcgggctatgaaaatttctgccacaatatgatttatatgaaaataaataaagtgggtctactactttatcattagcaataagtggattctttcttcctgccacagacaaactgaggatgtaaatgaacaccatactcgcattgttgcttatgctgttgttcttcacccactgcctgaggtgtaggtttgcaaataaaatcaaaccatcattattctggactgattatccaattagagaatgaaataggccagccctgtcttccttcttcttccatcaaatgccattcttgtagccatttcactgacaacatgaggggccaacagaagaaataaacaggcataaatttcaaacccaggaaatttatgtgagcaaagggaaagaatccagatatataaaatgaattaatcatcaataagtcaccacatccctattacatggtaagttcttttctgggagctgttagggccagaaagggactgtaagacacagtccctgctttaaagaagtacaaacaatcaccaaaaataaaagcaaaactgaaaaacagcaaataaataatcatttatcagaaccaactatggactatggatagtttaaaagtgctgagagcatagcccacatggcagaagtgcataaataatgcaaaaccttacattggctgacaatttaaacttcccttcatgatcattcttctgtcagaaccgctgagagagataaagaagataataataacaaaagaacttcaagtttctggtgattctaagtaggttctagtttcaggagtattccaacacactatgttaccttagacaagtcatgttctctctttgtgattaggtttctcatcaaaaggaaggaaagaaggaagggaggaagaagggactgggagtgttggtaatagataacccttaatatcccattcagatcaaatttctataattataatgtggctctctgcctctggaggtcactcagtaacaaagaaatataactttaaaaatagccaaagtaggaaaaataacaatcattctcataaatctgcagtttctttctttctttctctctctctcttttcttctctctctcttctcttccttcctttctttcttctttctttctttcttttcttttctttctttctttcctttctttctttccctgtctctctctctctctttctttctttccttctttctttctctttcttcctttctgatggagtcttgctctgtcaccaggtgggagtgcagtggtgccagatcagctcactgcaacctccacctcctgggttcaagtgattcccgggcctcagcctccccaagtagctagggactcaggtgagagtcaccaggcccagctaatttttgtatttttagtagagatggagtttcaccatgttggtcaggatggtctcgatctcttgaccttgtgatctgcccccccttgcccttctgaagtgctgggattacaggcatgagccaccacacctggccataaatctgcagtttctacagctactttgcaactatgaacaaatgctagtgtacacagaaaactccctccctcctgtaagcttcttatgcatgccacagactctggcctcccagctgggccagatacatttgaatgctggagcactcagctgattaagatacctaatttctgaatgatcccactcacaccaggaggacagtgtttagagcaagatgttacatctcagttgactcaccttgtgcaatgatttctttttataaatgctaattgcaactcactaattaagagagatgttacactgggcaggaaaatcattgagtcaggaaatcttgcaattttctctagcatatttcatgaatcaaaagtcttgatctgatgcagttttttcatggcctagagggcagaataggagctgaataccacagcttctcttcataagggtggtatggaaatggactcccagtttaaaagagagtcaaatgtccatcctgggagaattagcagagtattgtggttaagggcagaggctttgaagacaggcctggactaatttatttttgcctatggtttaggacagagggtccaagactgtctttttcatcttgtcatctcagcatttaggatagcaaggggtacatagcaggtgctaaataaatgtgttgtgaaatttaagtcctggttctaccatgcataagctgtttcctagggcaccttccataacctcttggagactcttctgtttttttgcttttgtgtgtgtgtgtgtgtgtgtgtgtgtgtgttgttgctgttgtcattattttgtaaaatgggatgtctcagttggggttcctctgcaggagaacctgagaaaaggatttgattacaaatagttaacttgggaagtgatctcaggaaacaccagtaagggaacaggaaagtggggaggagatgggaaagcatccataaagagtttgttatcaagcatttatcactgtgggcaactaaaggaaaatcccactggggtactctggcagccaggatctacacatggctttatgtgtaaacagaagagccttgcgaccaaggggtgagggggctggggcattgatccaacacctcctgttggtcactggttgaggaggcattaagtccctagcacttacgacctgtagacaggcccacaagcaagcttcagtgactggagaaagtcctctggcaaagaaatgcagatgctggcaattcaaaatctagccacctgcactacaggtaagggcaagcgggtctgggttgcggtgacaggcaccaacagggccagcctcccaggaataataaaacctatgtcttaggttgatgtgaggcttaaatgaagcggcggatggaaaggactgattgcgaccctgcacactgtacctccattcactgagggcttcctgctgtcatgagaacatggaaaatgtggcgctccccactaaggcccctggagccatgcatcaggtagaatacagtctcaagggcatcttgagaccttatagatccagagaaatgccacttcctagccttggaaactgacaatgcacattagcatatggaaggctctgaggattcttatggttaagaaactctttaattaaatgaggatttcccaaacttactggagcacagagttctctttccaaataatgtatgccaactttcagtgtaatccaacactccatgaagcacattttgggaaaagaaggcctgagactggtgaattttacccagaaaagcattccataatttccagctcacccccaaaattctgctgacaaatatgtttccttaactacacccaaatcttctgatttcatcttctttttttctttttctttttgttttttgagacaaggtctggccctattgcccaggctggagtccagtggcaccatcttggctcactgcaacctcagtctccagggctcaaaggatcctttcacctcagcgtcctgcatagctgggactacaggcatgcacctctacatccagctaattttttgtattttttctagagatgggtttcaccatgttgcccaggctggtctcaaactcacaagctcaagcaccttggcctcccaaagtgctggattacaggcatgagccaccatgcccagcctcacctccttttttaatgaacccaaacccaccctgatgatttttttattctgcatttctcagattcataatggttttcacgtgtgatttgaaatcatttatgggagctgcatgagcaacttacatcctggagtttacaggtgttgcaccctgcccaaagttgctgagtgctcaccaagtcctgcttctctcagaggcagcattacctaatggacaggagtctccgggcccagctctgttgcttattaactttcccaacgtcatttgtaaaatgagaaaatgtctgttgttcacaggtgatatagttaggctctgtgtccccatccaaaatctcatcttgaattgtaatccctataatctccacctgtcaagggtgggaccaggtggaggtaattggatcacgggggcggtttccctcatgcttttctcgtgatagtgagtaagtctcaagaaagctgatggttttataagcatctggcatttcccctgcttgaactcactctgtcctgccaccctgtgaagaaggtgccttcttctcctttgccttccaccgtgattgtaagtttcctgaggcctccccaggcatgcggaactgtgagtcaattcaacctctttcctttataaattacccggtctggaggattccttcatagtagtgtaagaatggactaataccacaggttactatagaaattaaatgaattacagcacaaaacatccagcactgtgcagccaccaactaatgctcaatgaatgtcgcttgcctttcaaatttcttcctctaaccacccctagccctgattccaattcttcattacttagataattgtcatataaagagaaaatagaatgatgaaatggaaagactgttgcctgaataattcaggccacttagtgagtatctatatccatatagacagctgtgtagctacctctctacaggtaggtaccttaatatgcaatgtccatctgtatctatatagagatacagatatatagaggcagagatatttcatgcaataaatatttattaagcacctgctggtgcctggcattgctctgtgttggatgaaaatactgaataagacagacatgatccctgctcacaagtaggttacggcctagtagtacagacaagtcacatcaagaaacaactaaacaatgaagcaaacaaacaactaattacaaattgcttcaagcaaatgcttgtataaattgctataaaacacacaaattccagtgagggacactttagactgtgtggccacagaggcctttctaatgaggtgatagatcagtggagaactgaagggagagagtgggccatcaggggacgcaggggcaagtgccatccaaaggagcgggttgctgcctgccattgctgaggcagggagaagaagcctggggggtgcaggagaaggcagaagctctaaggccatggcaggctttatgggccgtaaggaggtcttggtttccatctaagaagaaggaaaaagtttaaagaggtgggccacaaaagcagattgaaaaagggttgacattttaaaagatccctgcaaacaactaaagaaaggagatgactgtgagattctcagagaattctttcctgcctgctattgatctccaaaaagtgtgattctataacaagagcaaacattgacagtgagtcagatacctctgtaatcatttttaaatcactcattttattcccacaacaccttacatgcggtggccatggttgtccccattttacagatgtggcagcagttgaggcacagagagcttaaacatcttgccgaagctcacctagcaatgagatgatggagccgcggttgaaatttaggcagtggaactccagatgtgtgctcaccctgccctgttctgcctccctggaagcacgctcagccatggctctggctgcctctcccatgctgcccccgagatttcattccctgtatgcctgaacgtcaacacaagtgtctttcttctcagtcccatggaaacggttcctccaccattacgatctgaactaaaacaataagaagatgctatgcaaaaaatgaacctgggtgagtactgaacactttaaaatgcaagactttactaaggctaaatagaattgaaagctatagcctcagaagagaatgtcacaaaaccctgacacagtgaaacaattacataactaagaagtgaggggaaaggatgggggagaaaatgaaatgtcattttctcttctttcacagcagaaagttcatctgttttacaccaaattaaaaaacaaagttggccgggcatggtggctcacgcctgtaatcccagcactttgggaggccaaggtgggtggatcacgaggttaggagatcgagaccatcctggctaacagggtgaaactccgtctgtactaaaaatacaaaaaaattagccaggcacggtggcaggcacctgtagtcccagctacttgggagactgaggcaggagaatggcatgaacctgggaggcagagtttgcagtgagccaagatcacaccactgcactccagcctgggtgacagagcgagactccatcttaaaaaaaaaaaaaaaaaaaaaaaaaaaagttaaatgaaaacatgactctaccttcatcttttctcctaattgctttctcatattcatatcagcatgtcttaggaggtaaaagttacaaagtttagcgattgcttcatttttctccaatttttctacattcaagtgaaatcacctttgcaaaattatgacaacaagagaaatctgacagagctgactccctcttgcttccaacttccaagctacccttagtcattcctgggcataggccaagctaactttgggaggaatttatagtttaacctttaagcaaggacagtaatagcccttcccaaaactaaattgtccttgtaaaactaacgaaaggccataaggttagggttataagaggtgcctgaattctgctaacacataagcgcagttaaatgataaccagccattgttctggaggtcacagatttgtaacttcctcaattactcttgtaaataacatcactactgtagaactgaagactggccctgggagatgtttttcagacttctggcatttctggcgagtgactgaccccacctggacccaagactcatgactcagccagtcctgtggtccccacccagaggactcaacacgagtggactgttttccatacgcttgtggttttacccccaagcaatcaacattccctgttccctagccccctgcccaccaaaccatcctgaaaaactcctaacctcctagcctttggggagactgatttgaaggataaccctagtcctccagggtggccagactcacattaattaaactctttctttacagcaatactgccatctcactgaattacttttgtctgtgcagcagacagggaaaatccactgggtgactacacaaataagcttaaacttaacagttttattttttaaaaaaacatgtaggccaggcacagtggctcatgcctataaccccagcactatgggaggctgaggcaggcgggtcccgaggtcaggaattcaaaaccatcctggccaacatggtgaaaccctgtctctgctaaaaaatacaaaaaattagccgggcatggtggcaagtgcctgtaatcccagctactcgggaggctagtacaagttcattttatataaatttctgtttgtctaacttatttacttatctactgtacagaaaaatatctagaatgatctttatccaatgtgatcaaatgttttatgatatttgctttggtttgttggacacattcttcttggcattttctgtgttgcttccatttctcttaaatgaatatgttgagttttttaaataataaaataattattttgaaaatacataaggaagacgtccagacttgctttacttgatcatatgaaataaactcctcttcacgctggagcaaaataagagcactcttatcttgggggttttggaagtatttctgtggtttctgggatgcaatatctcagccagaaaaataagcccttcatcctgccttcagcgaggcgagccccacagcaagggccaaagtctaggaggcctgagcatgaggctgcagtgtctccaagccccactgcctttaatgggaacagcgtcctggcaccctctccaggatcacagcagtgagctctgtcctctggtcacctgcgccaccaacaccctgacaaggtcctcctcctccttagcgatgggctgcctcctttcccacagcttctggtgcccccatgggttgggggcagggagggaagtagcaaagaattaagaatcagatccagagaagcatgtggtcatatcaaagaaggagtgtaaatagctcctatacaatgaggtgatcagatctctaagaggctcagggaaaataatcaggaataagtggaaagacagaaatgaaactgaacaaaagaaaacacttttagggagaaggaagtttgaggcaggtcatcatcctcaagaatcttctttgaggcaaaagagctgtatgccatgaggagaaaatgatacaggcagagcaagagaaaaataatgacctagtcattggctcaagattaaaagctataatagaccctttgatcctcacagtaactcctttaggtagtgaaggcaagagctcatctccttattataggtgagggtgataggattcagagactatagcttgttgctcaaggtcaagcagactggtgcaggtgcagcctggaccacaaggaggtctctggacctgatcactcggccatgggagtctcctctctctccccttcccccttttcatggaagtgagagttgtgtgaatctgatattccccatagtccccccctccatgattcctagtttgctcccagctcctctcccctctctagctccataactggggtcaaagccaggctaacttgagaagctgagtggaaatctcatttttggcttgctaagaagttgtcttgagacccctttgtttcatagggaggaaggtttcccagcagaggttaagttttgtgctcaggtttaaggcatgagtcaaggtcaagcttcggtagttgcccaggttttatttcaagggaagaaggagttcaaggtgatagctctctttgagggagggaggaagggaggactgtgtagttgtggatatggtagcctggccagccaatgcgtaagtgtaataagtaatcctcatactctcaccccatgctgcaagaactgtggtaataaccttgagcaacggcacacccttcctcctaacaacacaggtttaggctaaagacattatccattaaaaataaccacattttataaactttgtgttgtgtgagttttttccccattcttttttgaagcaactggcttggtacataaattacactgtgtgctagagaatatatgacacggctgtgaattacaaggtcataattttaccagcaattttagatgctgccataaaccatccaatgtctgagagagctctaatacattttgatttttttcctaagcccccagaatggcattctaggccagctcttaaaagatgcttcatttcttgcttttgttttaggaaaacaatagccaagtaacatcatccgctcctttctttcttttcttccctatagtatcgttgccttttatttttttgttaaattactagcatctatcttagatagatgttccctcagccttcttatgggaaagatgggcttatgtagggctttgagtgagcaaagttcccagagccacaccattttggcccagggcttgcctaaagacataacgaagtgaccttggaccaggtggttctgttcagtctcaggtggaaatgttttccctggtcttctgtccttaccttcttctccacttcaacttaagttacacctacatccttgcttttcccctaattttcaggcctttgttcatttgcaaacacttgccctcagtttgacctgcctattcccccctcctgtagctaacaaatttctacttcagactccaggaaccagccagaacaccacctccttttggaaagtcttccctgggacacgtcaggctgtctcttttctgcctgttcccccagcactctcctgccatattcaatgcaacacactggaattctttacttacttccttctcccccatgaatgagctcaccagcccttgtcccttttcttttgttcattcattcatgtctaaattcacaaaacattcattgagggttccttttagtaacttcagtaagacttgacacagtgcctagaatgtggtaatgggaatgtctgttgaatgaaacaaaatgagctaaaaagaaataagtggatggaggtggatgaatcccaactactgtgcatctgcaggacacggtcaaagagaaggtccctaacagggtaactgggaaggctctcctcctgttcccctgctcttctccaagggtgtcaacggagtaagtcctgccccagagtaaatccactccagttactataaccacgcactgaggatccctcagctgcctccctatatgatcactctgaaatattcacaccagtccacttcctggctccccaaagaaggatgcaaattcctccccctgctcacctttttctcttgtctggaatgctcttggccctccactccacttagttaaggcttttccatgttttaagactcaactcaagtccagctcccccagcaagtccctatggctacaggcacatctgcctacttttaacttatagcatatactacatgtggttcctaatcagaacataactcatcccatctgaatacaggcctaactaattggcgtgcactgagggagcaggggcagaccatagttctcactgctgagggggaatgtgactggttaaaagacctctaagtctagcccaggctatgctatttactacttgtgtgacactgcagacctcttggaacatccttgcccatatctgccaattcagagataacaataacatccatctcacagagtttatcaaatacagtaatgcttacaaaaggttttcacatagttgaacagctgtggaaatgtcatgtcttataaatgcacctaagtaaactcaggcaaccctaataggccctggttttgttagtcattgaggccactccttccatatgttatgttcccttggcactgagcttcctttcaaattaagaattgaattgattcatgcaggtgactcaacaactcataatttagatctgctttcactctcaccatgaaatacacacagacagctgacaccatgctcttgacttacgagcctatttttctaaaaggcccagtccctccaaggctctttcatccactcaatatggtcagccacaggcttggtttgaactgcctgttgatagaaacattgtctgtcggctccatggtccttgaccacatgacagccttcaaggacagatgtgggataaggaaataaataacagctgttttactgacacttgtactcattcattcaggccaaggtgagaaggatgggtaggattcttcatatggactcactggtatatcctagtgagttttgtttaagagacagggtctctgtgtttgtcacccaggctggggtacagcggcatgattatggctctgagcagcctcaacctctttgcctcaagcgatcctcctgcctcagcttcccaagtagttaggactacaggcataagccaccacgcccaactactttttttttttgtagggatggggtctcactatgttgcccaagctggtcttcaacccctgggctcaagcaatcttcctgccctggcctcccaagctgctgagattacaggtgtgagccaccatgcctgatggagttttaatagtagttactgcattgcaccagccagatatttcatctgagaaaagtcaggcacactaggttccatcattcaattactatcctattaagctgaattcagttatgagtgtgtttagagatgtgcatgtatcttgtagtcaacgcatggataacatgtgaattctatccaaagcaataagtgctctgcatacatttaaatgcatgtcttctcatgtttactcttctgtagtattatttaactatttattcatcttttgttatattgacttatgaaagactttgaactcttgttgtagaaaaggtatttggaattcccatatctataactagattaagctactctaggctgaaattgtgtcttacatttcacagtataccatgcacaacaagcagagtgctatgatccatatgtatctattgagtgaatcatttattaatctcaaattacatccccaaatcctgttctttccttcctttgcctttttttcctagatatcaagaagcacactgattctagttaagtagttattactttgagctcagttaaagatactaaatattggcactcttggtggcccccattccaagcatccttttatgtaaaagaactgtaatcctatgagcaaagacctgtaaaactgactgcagctaagggaattatgcccccatgcagataatgctgtggaccaaacagttccgataagcaaacaaaatctctcagacaattatgttcttgtttaaggccgtttgccttggaattcccaaaaggattctggaggattgcaaatttgctggggatgaagaaagaaagtactagctagagtttaatagattattggattaagacaggccagaaacagtcaaacaagaaaagtattatgcaaaaccttctaaggttctaatctcaccttatttctattttgattaatattttcctgggaaagaaaagatgggggtttttgttgttctctgactacaatccagagataacatctttgcctccagttttcatcaagataaagacctggaagacccgagccaaaaggaaggagctggaattttttttaaatctttctttctggtctttaaggaagttatctgaaaacccactggtactctccaatgggtaaagaatgagacagaactagcagaaagtgttaaagcattagacaggcaaattaacttagagacagtgggagaatgattccatctccattgattttccagtctgtaaatatgaaatgctggaaggatacttgtgacatttggaaagttttatctagaaatctccaattaattttagagtgcatagcatacatcaattaaacagactgcggggttcatatttcctacacggtcgtgactcatcctcggaagatctgacccatcaaggataatgatttcatcttgatattggtgactaatatttctgtttgtatgtccagtgtctgctacagagcctgacatagagtaagtaaatgctcaaacatatggataaatgaatcaattaaaaacctcataaaatctttaccctattaatcttcctcctatagcaggggttggtaaactacagcctgtgagacaaatctggccaccaccagttcttgcacaggacaccagctaaaaatgttttccccctacattttaaaacagctaaaaaaattagaatattttatggaatatgaaaattgtatgaaattcaaatttcagtgtcccgaatacaattttattgggacacagctatgtccactcttttacctattgcctatggctgctttcatgccacagaggcagagttgaatggtggtggtggagatcatacagcccctgaagccaaaaacattgactatcaggccctttatggaagaattttgctgacccttattctatagaatggaacttgggaacccttatcatttgtcattcattccattgttcactcagtggctatttactgagtatctcccatgcgtgcagtgctctgtcccattctggggataaaacagagagctgagaaagatccctgccttgatggaactcacagtctgggtctggagcagcagaaagaggctcatcaagtaaccttccaagcacctttgcaatcacaacagtgaggagagctaagaaatggtacatggggtaagcttccatgatgtactgatggttatgctaattactaaagactgtcaaatcaggacccaaattgtctagtgccaaggtggatgtctttgctccttcctttttctgccctgagacactcttcattctcagttgggtttcccttttagaatgacctgtgacatgtgtcttctcctcatgtgacactcttcctctttctaaccccagcacctagaacaaagcctgacacacgggagacactcagggcatcactgttgaacaaatgaaagaattaattcattaggagaagaaatgtaagcaaattcctgggcatccccaggccccagttttctcatcagtagaataagaaggatatgatgtactcaagcctcccagctcggcattctgcaatttgtcatgtcctgagagctggactcatctggctttctgattcactcctctctgtggacataaggcagactccctctgactcagcagcctgatgcatcttcctgagtgacacatgaactctgcccaaggcaaggcggccagccccaatccattccacggatcactgctgacagtgaatgggagtatacctgggggttttagccaaggtctgctcaaggtctttggcataaagggaggccaggttgaacacacaccagcaggaagagagatgaccttgacttcataaattggccataaattagagctaagaatcaggaagattctccttccatgcacatttctaaatggcagtttcaaggcaggtggctattttaaaacacagacacaaactcataattcaccctctttgtcccccaccctcctacatgccattgatctttcttttttttttttggaatcctgaaacatgatctttaagaaaagacaactggactccaggattacttcctagctcttcctcctctagaagccaccatttctcttcgctatctagaccccagggaagtggctttggcaaaagcacatttgcacccatggatcatttggttttcttgtcctgttaactgcctggttctgcagcacccagagccagataatagaggtgttccttcaccagccacagctactatcaggatccctcttagtccggaggtaacagaagcaactggttgaacgtgtttcctcctgggaaatcctaaatgttccatatggcaatagggaatctagagttgtgtttctccttgtattagggatattttccctctttcagtttcttcccattttttcccatctaaaatatgttttttccactttgctgagatgaagaccagccagagagtcaaaggaaatgacagacatgccataatagaaagaaaaaaatacagacttctgaagaatgagttgattcatgccatgaaaactcacgataaaaatattcactacttttttttggccacttgtcatagtgtgctgcctctgctaggcagctgaaagtgtctcatatgaaaagctctattatcctccacagaaatgacctttgggacccacccaacggtagtcaatggtaatattatactaacttgccccccaagaggaaagaatgaaataataatacttaaaatatgaatgcagagaagtcctcacttaaacacagtacttctggttcataaatcagttctgacacattgaagtacacatatgatgactagacgcaagtttattaacacattttctttctttttaggtctgagaaacatatctattcagaatccatacatttgttcattttttgaagctgacagcttgataggcaaaaagtaaagtgacagatcatttcaatatttcttttaaattcaaaaccaattcagtcaaaagaccgaaggaaaatattctacggagataaaatgataatgcaaacaattgaagacagtcctttattttagtgaaaacaggtaatgtctgtactctggagtcgggctgacttcctcctcttaacctgccctgcaagtccaattagaatggttttctgcggggagttgttttccatttatacttagcccgaacacgtatacctacttttcaaactcttagctattcacttgacatttgtcttcttcagtcttcactaaatagtctttggaccctttgggagtcttataagagttattttctgaaagttaaaaacgtaggaccttatttcggcagaggttaactaaaccaggcttcaaagaggattctgagggcgacagccactataatgtccattcctactttccttcactaggtggcagcacgtcacaacacatttttcagaacagtctggggaaaatgcagttgagctaaagtgaggttggggagtctctgcgggctatgggaggaggatacacattagggcaggtcagtgcatggaaaagctggcgacacttgtgtttcctataggtcccctttgttcccagtggagctggggcccttcgtctctaacaaaccagaagtacttgtactaatggaagggaggctatttatttcataaaataaatataaacaaacaagaaaattgaaataagaagtcctctgaccatgtgcacgttgctccagacaccaaaacatgagaaagcacttctgacccagtttgtaaattcgagttatagtattttacgtttgctaaaatattcacctaccacagtaagaatttttgtttatctgatgcaacctgtttggtgttataggcagatgctaagttacaggctttgtggtggatactgggcaacagatgtggtaagaaggggagcagcccaagatgaaatttcctccaaaacaccagaggttcctgtctcaagcagagaaatcataatactgcaacacatactagtttgcaaagggcaagtcgctatggccaaaaatgattgattcagaggaagaggaagggaaggaagaagaaagagaggaagaggaggggaaggacatggaggagggaaaagaaaaggagaaggagggagagggagaggagaaggaggaagaggatgaagaggaagaagaaaagaaggaggggaggaggagttttaactgaatactgtatttttgccttaatgtaggaaagatgaaggggagaaggaggtaactgctagtggacattgagaagctgtcaatacagcaagaccttgccaaaggttgatcaatagcctctttttaaaattaatacatagtagatggatgtattttcagtgtctatgtgataatttgatacatccatattgtcaaactagggtaactgggacatccatcaccttaaaatatttatcttttctacatgctaggaacattgaaattattcttttgtagctattttgaaatgtacaattgattcatgttaacttgtcaccctaatgttaactggtcaccctactgatctatcaaacaccaagtcttatttcttctatctaagtgtatatttattcccattaatcaacctctcttcatcctcccctccttcctacccttccctgcctcagataactaccaatctactctctatcttcatgagatccccttttttttagctcccacatgtgaatgagaacacgcaatatttgtctttctgtgcttggattatttcacttaacacaacgacctccagttccatccacggtgccacaaatgacagggtttcattctttttcatggaacagccttcctttgaagagagacattcactctcctgctagagacagcctccacctggcctgcttcacccatttgttatcttcttgtccctgtaagcatttgtgtttgcaatctggggtttatagattcatctttcctatagtagggctaaaatatcttagtttaaactccaagcctaggacaacagctggcacattacacttgttttaaggtttgttgagtgaatgatgataataataaagatgatgataataatgaaaccggcaatatttatgaagtttcttaaccagggcagagactagggtaagacagtgatgcatccagggaacaaaattgaaaggcacgctcattttctttttctttctttcttttttttttttaattttgagacaggggctgactctgtccccaggctggagtgcaatggcatgatcttgtctcactgcagcctcgacttcctcgagcaatccttccacctcagcccccaaatagcaggaacttcaaacatgcagcatcatgtctggctaatttttgtattttttgtagagatggggtctcaccatgttgcccaggctggtctcaaactccaggactcaagcgatcctcccacctcagcttcccaaattgctgggattacaggcatgagctgctgcacccagctgaggccctcgctttcagggtcacttgcttcatcttgctcctagcctatttataacataggccagttttctttacatgatttatctcattggtagggcttttaaacatttctgtctctcatcacatgtatgagttactactaaaccgtgggtatatagtagtaattaaaagctcaggcgctgagatcacaaagatgtgagttcgaattcttgctgtatcacttgctgaagtcatacagcaagtaagacaggtcacacaggtcacctctccaagttccaagttcctctacctgtgtgttaggattaaatgagataggccggtaaagagctttgtccaatacctgccacaaaatatagtcatgcattgcttaatgacagggatgtgtcattaggcaattttgtcattgagcaaacatcataaagtacacttagacaaacctagattgtatagcctcctacacacctaggctatatggtatagcctattgctcctaagctacaaatttgtacagcattactgtactgaatactgcaagcaactgtaacacaatggtaagttttgtgcatctaaacatataaaagatacagtaaaaatacatattataagcttatgggaccaccattgcatatgggaattgttgctgacagaaacattatgtagcaggactgtacatagcagctataataataataacaataacaagagcaaaaataacttattttattcctattacatttataaggatttcagagaaaaattcatgttcaggtcatcaaaattgattagtagctattgtatgcaaaacatagtgccagacatttagaggaatataaaagaatatataacatagctgcaaatctagaccagggatcagcaaactttctctaaaaagaaagataataattttttaaggcttttttgggtcctatcttcttcatgtcattgccataaacaatatgtgaacgaatgaacatggctatgttccaagaaaactttatttacaaaaacaggcagtaggccagagtggctaactcctgatctagttgatgagtcaggacaggtacatgttacttataaaaacacaaccacatcagaagatcacccatgatcaaaagagtggctcagactatagtggttttggaagaggcaagtaacaggataataactggttgagtgcaggtaagcagagaagacaagaaagcagctgctagacaagaaactaccaaaaccatggcgatggaacatatctgagattgggtaggagtggttggtaagtaggctggctagagtgaaaatgggagaaattcacaaaaatgcaaacagggctggagaagaaggctaggtgagaatataaagaaggaagaccatgagactgagttttttgtttgtttaatttaatttaattttttatttttattttttttttaagatgggatttcactgtattgcccaggctggagtacagtagcacaaccacagctcactgtagcttcaacctccaaggctcaagcaatcctcccacctcagcctcctgagtagctgggaccacaggtatgtgccaccatgccgggctaattttttaaaaaaatttttgtagagacagggtctcactgtgttgcctaggctggcctcaaacgatcctcttgccttgggctctcaaagtgctgggattacaggagtgagccaccacactcagccaagtttttacaaaaaggaagtatctgctgtgctcccaatctggccagtgaggtttgcaatccactcaggaaataataagctaattttaccctttatgagctgggttgctaaattcctacctggccttaaaggggtaagtcgaatttagtgattgtgatatgggagcaaagtgtcaccacactagtgtttggcatttatttcgagtgatatagtgtgtcttatgaaaaatgggccaggcacagtggctcacacctgtatcccagtactttgggagaccgaggtgggcagatcacttgaggtcaggtgttcaagaccagcctgtccaacatggtgaaaccccatctctactaaaaatacaaaaattagctgggcgtggtggtgggcacctgtaatcccagctacttgggaggctgaggcaggagaatcacttgaacccaggaggcggaggttgcagtgagccaagattgtgccactgcactccagcctgggcaacaatgcaagacccaatctaaaaaataataataaaaataaatttaaaaaaaagaaaaatggagctctgctcaccacctatcatctgttcttactctcatgagcaggcttgggcccaggcctgggcatctcagtgtctgcaagtgagatgactgggaaagaagatttgttcaaataagtcaccctgctattggagagaggctggaccctaagagagcccttccctcgaggagcgggctgagatactgtatccctgggagaaggttggaggtgaggctccatccctgggagaaggtcggaggtgaggctccatccctgggagaaggtcagaggtgaggctccatccctgggagaaggtcagaggtgaggctccatccctgggagaaggtcagaggtgaggctccatccctgggagaacatcggaggtgagactctagggatgagttagaaatttggcctgggacctccctccgcccctctccttccctaatctccaacacaccctgtatctattttcctgaatgagttgaccctatcctaatttcagagagtttaggaagcgatatcaaccaaattggctctagacaaaatactagtgactaataaagtcaagcaaaggtgctcattcttactagtaaccaaggacttggaataccttagaaggggattacaagtggaagatccaagagctatgggaaaagggttctgctgttcaagttgaaattgtaatatggaatatcataggatgagtatatctcaagatgtaaatgactcagattttaatctcaaaaacatatgaaataaaggattacattaataagaatactgatatttaggagcacaaaatagcaaggtttactctaataccagaatcctggaaacttgcatagcagctacaactagaattcaagttcagcctcaccgtgggctggaccagcagatctcaaagtgtggcccccagatcagcagcagcagcatcacttgggaatgtgttagccatgcagatcctcaggccccatcccaggtgtactgaatctgaaactctggggatggaacaccccaaatctgtaatttaaccagacctctaggtgactctggtgcactcaaagtttgagaaccactggtctatctagaatacatagtgtgcttgttccaaagcaattgtccttaccacgacccaaagagcctcacagaatagatttcggaaagtacgtgtgcgtgtgtgtgtgtgcgtgtgtgtgtgtgtgtgtgtgtgtgtgtgtgtgtgtgtgtgttgaagtttctcaggtattcaggtatgttcctctggtttaagaaccaccactgtgccaggcctctcaacagtggctgcacaagtgaaattattcagagaacttgaaaacattctggtgactgagttcatccccaattctcatatgcttggttagaaatacagtctggccaggaggacgtgtcagagttcctgggtgattctaacatactgccaagatcatttagcccatagaagaatcaccaggagaatttgttaaaacagattcctcagccctacctttcagagattctccaggtttagggttgaactccaacatttttatttctattaagctcccaggccatgtgctggcttgcagaccgcacctcgagtagtcctgctctaggagaaacatgtttatattttagatacctgaaatcttctttgggctgggatggccaactttcctccatctgttcctcctctaaattcctataaacttactgttctttctagaggacactccaattaagttattaacatcttatagaggcaagatctatgttttccccatctttgggtcactcctagcacctagggatttgcacacagtaggtgttcagctgaataatgcagtcgaatccctgagctggtttcaggtgttcattttctccctatctgatctgctagccaggtcaatccattatggccctggtctcatggaaaagaatcaaggcatctattttttgaagatgatgtgaaggtaaatatacgtccagtcctagagatttaggttgctgaggaggctgttccaataataccccagatgaagtacagccatctggagaggttttggcatccatgcaaacctactgctgaattcgttccttgaagacattcattttaggatggtatttccaatttggcatataacagagccatgcaaatcaatgaggatttagaatctctacttacggagggcatcttatttaaagcgtgtccctgacaaagcaatatcaagggaacacaattggaaatctcttggagaggagtaatttctctagaagcagttttagctatagcagcgaccggaacagcaatgagctccctgaaatacatccaaatttttagtattccacttggctgggctgccttcttcagagcccaatcatagggacagaacttaataatgagttcatttttcttgtcacactagagcaattcagttgcaatgctattcataaggtgtatgttgccattgaattctttctcaaaaaaaaacaaaaaaaaaaaagctcaagccaagagtagagccccatgtcagtctatatgcgctaacaaaataccttagactgggtaatttataaacaacagcaattgattgctcacagttctaaaggccggaatgtcccagatcaaggcgacaacagattcagcatctggggagggttttttctctgctccatagatggcactttcttgtttccctgcatggtgggagggacaaacagcctcccaagggcttctttcataagggcaccaataccattcctgagggctccaccctcatgatctaatcatctcccagaggccccatctccaacacgacggcattgggatttcatttcaacacatacatttggggcagatacaaacattcagaccatagcagcccataacatctagcatgatactatttcaacatggactaatggtaaaaacatggattgtttttatttatttggctacttgtatagaatgggtcaagaagctcagaagaggggactggtgaacatgggggaaaaaagtagtttggaggctggtaagttattaaaaatgtgttaacttgtagcttgagagacagcatagtatcatatcaagtaacatggactttggaggtagattgcctgagatcaaagctgagctctaccatttactcactaggtgactctcagcaatttatttaaccttctgaagcctcagtttccccatctgtaatatgggcccccaaatgacacctatttcatagtactgtttggaagagcacttgagacaattatatactgtatgtacatacacatacatacatatatatacacatatatgtaatatgtgtaatatgaacacatctaactttattctagttatggaagcacttttcttttggatttctctttctctcaaaccccccaacccccactctcctaaggacacctggcccaaaaagggaaatcatactttttcttttctttatttcactattcttattctaaagaaacccacagactacagacagcagtttacttagaaggctctgggcttcagggaatctagatgtccaagttgaaagtcagctgcctggaacatggagtgggtgacctctgggggcactcaggggcccttccttccaggcttcgggcactgtcactgagaagcaactcccttgggggaggggtgcttttggtcatagcggttgagtcaagttatcagatgtcaaatagcttataggagttcaaagtgagcctatctccaccactgctaaccacgaactgcccatctgagcatgatgaaattggcccccttcccctctccccttgctacttaattgctcacaaatccagcaaattgcaggaccagcctctagggggcaccagagacctttcctttcagagcccaaaatgccatttcagtagcagcagagtagtgtgtcctggagctggagcatggtccagtgtctcttgtgctttttggcctactgagtccttaagtatatttaatttaatttgggtagggtggtagagggttccttttaacagtgtattcatgatttctctagcatttcttcaggaaagttatttatttcttttagatatagaatttttaccattggtccattcactcaaaatcacttcaaaaaacatttgctaagcttccactatgtgcaagagtgtcctgggcatacaaaaagtaaaaagccatggtgtgtgctgtcacagactcattctagagcagcgtggtcccacagaactgtctatgatgatggaatgttccacatctgtgctgtccagctccgcagccaatgagccacatggggctcttgagtacctgaaaaacagctggtaggatggaggaactgagcttttaaataggcaaatgtggctaggagctaccatactggacagcacagtgtattagtttggtgcaaaagtaattgtggttttggccatttttaagtggattggtaagcctggctatttaaagtgtggtccacagagcaggagaatcactacacctgagagctggtggaaatgtagatctctgacgttagcataggcttcctaaatcagaaactgcattctaacaagatctcctggtgcttctcatgcacagtaaagtttagaaagttaggagatgcatacaagtggttctcatcctgactgcacttcagacacaactgagaaacattaaaagaagctgagcctaggtcacaccctccacccagagattcttaggttaatggtttaaaggcttggcctgaacatgaagagttttaaaagcactctgggggattctaataaaaattcgagaaccatcccagcataagtcagtacggtggctccaaaactggagatcaccaggagtgcttgttaaaacacagactgctggctccaactcgcggtttctgatccctgggtctcggttgagctctaagaaccctcatgtgtaacaagtccccagtaacgctgatgctgctgatccaggaaccacactttgagaaccactggtctaatcattttaaaagatgggctccagaattggactaacctgagtcttggacctgccacttacttagaccctgaacctcagtttcccaaactgtaaacttgggctatgaatatttactcatcgagttattgtgaatattaactcagagaatgactgtgagatgctgggcatagtgcctacttttaataagcaatcaataactgttccttactatcatgatcctaagaagactcactcattcattcattcaacaagtatgaactatgtgtcaggcactgttccaggtactagggacatagcgaaaaacaagggggccacagtccctgccacattgctatcatggaagctgcagtcctacctgtcagtacaaagcaggctgcgtatggtgctcctatagcacgaatcctaacagcacaatacaaaggtcagagaggaattcattccaatggatgagaatgggaaagctgcacacaggagctggagtcagagctgtgccttaatggggagaaggattacaacctgcagagtcagggcaggaacttactcatgaccaggcacagggcagagacagcaagaagatgcagctagcagcctagtggagctggggcaggaagtacagggaaaggggaggcaggaggcagggctgtgcatatggggatgccaaccagggtctgcctccactctctggccaaaccatactatttgtgtttgtttaaatcccaaacactgaaaattactgatgtcaggaaactgaaaccaggccacagctttcattcttgattattcttaccaaatgcagaggccagtcaacagaaggtccagagattcacagaatcatcctgaccctgcctgaaggtggggcggggctcttcagccaagcaggtggccttgggcccagatgctccattgaagcagaggaacagagagatgcttgagacttcagctgagccctgggtggggtaaccattaaaaggaagagtggtgtgctgaccccatccaccgcttcccttaggaaaatggtggcctaccaccacaactctttggtctcatttgggtttctctgtaaactccagaaagcaataaagcatgattcctaaaaaagagggctactaggtggaggttatgcagacctaatatgttcccctcagtcactgcagctgcacaggaaggggcacccaaacctcagagtaagttgcgtaagaacaacagacaacaggcaagtctgtctagtaactcacctgttcccatgaaaagaaaaaaaaatgtcactccatgcaaatgaggggtgtgggagggtgttgagcttcaataaggctctccccaacggtctcctccctaacaggctgtaaaataacatgaagcatggccccaaagggccgtgaatgacccctggagcaaaggactccaaaaggctctgcagagcttttggcacatctgaacaggggcccggatcccagcgcaccctcttctgggctctgactttggcaagttactcaacccctcagagcctcagattcctctttggaaataataatgggaataataatatgccccttttggtaggcagaacgatgaccctcaaagatgtctgtgttaatcttgggacctgtgaatatggtcatctacatgccagaaggaaatgaacgcagcaggcaaattaaggttgctgataggctgacctggagatgggaagagtatcctggagtatccaggtgggcccaatgtaatcacaagagtccttaaaagtagaagaaggaggcaaagaagagatggcaggaagcaagatcagagtgatgcaaggtggggatgcacccttagttgctggctgtgaaggtggagaaaggggccatgagccaaggggtgtaggtggcctctagaagctggaaaaggcaaggacatggaatcttccctagagcctctggagagacccatgttggacttctcacccacagaactgcttggaaatagaaaacttctacaccattttgcaaggttgtgaggctgatgcttggcactcagcaaggcctctctctttcttccttccttcctttcttccttccttctttcctttcttccttccttctttccttccttctttcttttctttccttccttttattttccttccttcctttcttccttcctttccttccttgcttcctttcttccttccttcactttcttccttctttccttccttccttctttcctctttccttccttccttctttccttttcttttccttcctctttctctgtttctctttctctctttctgactttctttcttttcttttcttttcttttttcttttctttagcagggtcttactatgttgcccaggttggtctcaaacacctgagctcaggggtcctcctgcctcatcctccccagtagcaaggccactttcttctctaggctgttattagcttctgtgggtacacaccatgctccacacatactaggcttcattctccctgtcttagcccatcattgcagcctccactgagccccagcctctcacagaagcctatcctcattctcccacccacatgagctctcactcctctgaactcccatggcctttacagcctgtaccttgcaattacgggcttaattatatagtgggtagtgttacctgctgtcactgcatgtgtgtttattttggttccaaaatgagattgaaactttagtctcaaacaggaacaatgttttgtccttttgttgttgttgtttttaagcacctgtgctttttttatataatcctgtttttattgccttctgacacaaaaaaaggactattttgggcatatatttataagcagataccctacatcattgcaactgccctgtgattgggcattaactcatttttctattttctagcagagtttactgaaggttttaaggtttaaggtctaaggccagttctgatacagacaatagaatcaagtttatagttttccaatcatggttccaatgaccatggtcccttatcatatgccgatttcatcagtcaaagaacaggggatggtgttggaaatcacagtaccagtaggatacagggtggcccggcatgtgttcctctcatcccagtgctgagcacacagtaggtaataaaaatgggctagaaaactggctggtgagtgcatcattactttcctcctactcccttctttaaatcctacaagatcaccctcaacaaaaacatacacacaggcaaggtgcagtggctcacacttgtaatcccagcactttgggaggctgaggcgggtagatcacctgaggtcaggagtttgagaccagcctggccaacatggcgatcccgtctctactaaaaatacaaacattagctgggtgtggtggcaagtgcctgtaatctgagctatcggggaggctgaggcaggagaatcgcttgaacccaggaggcagaggttgcagcgagccaatatcgcaccactgcactccagcctgggcaacaagggcgaaactccaaaacacaaaaacaaaaacaaaaaaacatacacacaaacagaggcagcacagcccattgacctaccttggggatacattcccaaaagagaatgagacagacggacatatgagttctccttggagcatgttattcaaatctcaaaataagataaagctctcatttcaaggtgcatttattttagtgaggtttggatttgtaagggaaacaaaatgaataagttggtgggtggggacaggaattaaaataagcagcgtcttgctgcttgccgacatgactgtcctcacatccgctgccttattttttattctgttctggtttgttttctcctgcggtgctttaaaatatgatgggtaggttagaaagagagaccgaggtaatcctggcttctgttcattaagctcgtatgaagtacgtgctgtgctactcacattacctcggtgaatccctatgaggtgggtgctgtaattagcccattgtacaggtgagataactgagcctgaggcagataaaatgctcatgctgagcgacccatcagcaaacagtttagccaagatgtggactgagttggtggagctcagagctgagctttaatctactctgcgccaatatccggggtgttcttaagccccagtctctctgtcccagatggagcaggtcggatctccaagctgctgaggggcactaggactcgggagacaccaggctagctctgcattcttctggtcctcctggcatttctagaaactggaggtgggcaaggaggagggggaaagaggagccaggagaacacggagtcttaaataagatctcttccctctcttcctgcctggagtgaagccctttatgagtaagcaccgatggagggatgccaacacaacacagcaaaactagccctgtcattcccaacccaggcctcacaactccaaatcattcaaggggtaaggacacagaaagaagagcagaggaagagtgtggacataaagtcagaccacatactggggaatgcacccctcccaccactcccaggagatgtgaccttggacaagataatctctcttagcctcagtttcttcatctgtaaatggggaaatgacaagtcctgcctcataggtttgctctgaggattaagtgagtccgtgtctgtgaggggctttccagagtgcccatcacacagtaggagctgactacatagtagtgtctctatgagtacaccgttacatgcactaggatgatctgcacaatgaatatattctgtactatacaacacgcaatcatatgccgacaattgaaaactaaacacggtgtggggagcgttctgggacaggtaagggcagggaccctgcattcactctggtttttatctcccacagagccagctaccgcacagtcctgtaccctcagcagggccaggaaagtttgtgcaggagaatggggatagacttcggtttcctgcatcttatcccaaacctcagccagaaaaggcagcacccttccactttccaggagaagggcagccatgcctgaaatgcccctatttaatgggattatttcttctcctttataagtcatatctcatgggaatgttcattttctctctggaagctcattggtacaatggttgtttcacaatgtaataacccatgtattaagtcagatgagaacctccttgaaatattattgtactgaattctcttccataacagggagatcagttttagatttcacccaaggagatttcgctaccaaagaacctaaagcatttcattaaaggtgctttctcctacaagaggaaagaggtttttttatttttgttattattatttcatatcccaaaaggttattgttctatgtgttcaatttcaatagtacttatgcttcctaaccataccgtatcatttacttccttattaggttcagtgtttcctgctttcccaacactgcagtataggagggtagggggataggactctatttcttcactgttgtttcccaatcatctggaatggtacctgacatatagtagatgctcaataaatattaatatacaaatggaagcacatttagagcacatttcttttggaaagcgaccacagttgatacaaagatgtatctcattagaaattcatttccacctcttttatttcctattcaatttttttcacccccattctgtgtttgtgccaatagattttttatgagatcacaacatatctccaaaaatcagaattaaatcatccacaggaaggctatggatttcaaagcataccagaactcctggccctaaaatgcttcagggaacgtgtcactcaccacaaggaagctgggctccacacttttaccgggggcatgttctgctcactgcagaggaggatgtctccaccacagtcaccagggagcccttccatcacccaggcccacaggggaccaagagacaatggacactggcagaaagtgcagattcatgaagtgtgaggactagaaggtaatttcatttaaacccccattcttcagatgagaaaactgaggatccagaaaagcaaagtggttgttcgagtgcacagggtaattaagcacagctcagtgaagaaggcagatcccacctctccccttccccatcgatttccctgtgtgtgcatgggtatgtgtttgaactcttagcaacaagatgttttaaaaggagtccctgttaacaactcatccataattttgactcaggggtgctgctgatagaattctactagcttccctgtccaccccaatgacctagatcccaaatttcccattaatgacccaagaaccttaaagactttctgagctaaaagattcttcgaagtcatctagccaaatctttatcttacagatgaaaaacaacaggctaggtaaagaaaattgagctcccaggtcacaaagccagttagcagtgaagctacagcagctgggactgctggcacccagggccacgtaagttacactgaggacacttctcagatttgtgtgtgactctactagcctcatcaggataaggagaaaataaggaggaatcaggatacgatacggagaaaataaggaggaatcaggatacgataagcaaaaaatccagtctaaccaagcatatctcaggtccaaaacaaaaacttttccttagagcaagagaatataattctaatgagaaaactgtagcaaaagaaatctttttaggatatggacacatacatatatatatatatgcatgcacacgtgtatgtgcatataatatagagattaccacacatactatattaagaagatgcttattttttaaaaaaatacttgacactaggtatataataaattcccagtgctagcaatggcatcaaaatggattgctagcggaagcctatcttgacacaacattttttaagttatccatcaatgtctgcacaaaagaaaatacacatattctttgaaccagcagttcctcttccaggaacctggaactattgatagaattagaattatacaaatatatgaataacagtgtttattaaaccattgtttctagcagcaataaaaggaaaaggaaaacattcaggtggtctatcattagggttatggctgaatatactgcgatacaaacaaattatggaattttatgcaactcttacaaaatgagttatcacagagctgacggaatgtccatcatgattagttaggaagccaaattgtggtgcaatgtaattatttgaaacaatttcttatacaaacaccaccatctctaaaacactatcatgtgtgcacatgtgaaggcctgggaaccgtgggtgtctaaaggaggaggcagtgatggaggcaaggggaaaagatgatgaatgctctcttcacacatctttgttttcattgattacaatgcatgcatattactttttaaataattaagccaaaaatcctaaaaataaggacagaaggaacccacaaatagtcctccaggttctgtttcggcctgccttcttccctagtagaccccatgacagcaggaatactctgaattcagggaaaaaatgaaatcaacgcagcaatgagaaacttgaagctgtctctctaagccctgggcttccatgactatcctctggtcaagttactttctccactaaagtgttctagtcctggtccaggaggtgccctgtacagtacagcccagcagcactctccccttaacacagaaagggacctcagtctcctgtaaggtgagagatgactcaagaagcttcatctctccctgccctacaaagaaccttgtacctataaatagaccatgcagaacccactttttggaagcagaccaaagctaactttggcaggcaggcctctggggtacctgagccagccactcggaaagttggccttacccccatgggcttcttaatccagtcctgactctaagttcctgaatgaaaagtgacagaaccatgaacataaaggccctggctgtgacagtgatgaccactaggctttgacaatgataaaactgcactgcctgaagcgcaaactgtgcaaaccctttggggctagtgctccaaagagagctgccaccatcaacttctaaaactccaagagcccgttgttcacattaatacatacaacattgtttgtagggagacagccccctcatccactgcaaattctgtccttcagccatgactcaggaaccaggaaggagaaggaaagagaggctgacttaccaagccaacttctgtttaagtacacagacacaaacacggggggcaccgtgaagaaatccactacagagttcacttccagccagaaccacaatttatcgttggctgcaataaactgggggaaagaagaaataagaaagagaaaaaacatgagaagcatggtgctggcatccaatgtacactcttttgtcaaagggtaagttttgagttttcatagggccaccacgcccggctaatttttgtatttttagtaaagatgggatttcaccatgttggccaggctggtctcgagctcctgacatcaggtgatccactcgcctcagcctcccaaagtgctgggattacaggcatgagtcactgcactcggcctatttctatttaatttttaaggtctggagggagacattatgtccttctcatatctacacaaagcacatgcttttatgattggacacacacgttttctagtgccccatagagagccctatatagactaactatatgctatgctagtcttaagagaaagatcaggcagtgtatttttctgtggttcccaacagcttcatagggaagattgggtgattttacttgtattagactcattcatgtaaatataactataaataaagcacatatgtacgcattcacacacacacacacacacacacacacaaaattccatccatctactctcctcaccttcctttcattcatactcacaactgctctctcagggctcagctaagtgaacactgctaaacgtaattttaagagctgaagaggtttatttctatttacttttgttttgttttatttttttgagatggagtcttactctgttgcccaggctggagtgcagtggcgtgatttcagctcactgcaacctctgcctcccaggttcaagcaattctcctgtctcagcctcctgagtagctgggattacagatgcccgccgccacgcctggctaacttttgtatttttagtagagatgggatttcaccaggttggtcaggctggtctcgaactcctgacctcaggtgattcacccgcctcagcctcccaaagctgggattacaggcgtgagccaccacactcagcctatttctatttaatttttaagggaacagggcattatgtgaatagagagatgagaaacaatccaccggtggatacatcatcatttttcttcaatccctatttctcccccttgaaacaaaactgatgtgaattccagaaaatgcttagctaaggagagggctctctctcagactgaaaatcagaatgcgggtgcgctgtttctcctggaaatatcttgactgcgagagcagaggctgagggggatgatccctgggtcccagactgaaacaccccattgtgatactgaacaatgttgcacaaacttacccgcaagccgaagtagagaaggaagaacacgttgaaagccatgtcgatctgtaatgtgaaatctttgtagaaattctggcaggattctattgggctattagacaggaagaagaaaaagcaagaggtaaatgacaggtagtatcatcctgtctcccacgatgctgagaagtggtagtgcttagggtagacgatgaaatgaatattcataaaagaaaacatttggtctttctgcctcctgggatcatcaagcaagcattgccaaggggtctttccattcaaccattcaggaactactgttcttttatttattgttttcgaaattattatatactatcattttttatcatcattcagcagttgaactaagaatctaaagaggatcatgcagataccctggaggaaggacaagcaggagaggcctccaaattccttaatttcatattaacccttaaagaacttctttctttctttgagaggacacatactaaagctaaaacacagttcctcatgccctccaacgcattggcagtggggcctgttttcaattaaacacagtggttgtgttttggaccttttaaaaaccattagttgattaataaattcaggacccaggagcatctcaagaaagctagagaggagaggatcctgggtgaggttctggctagattaagcacagactttctgtgcaggactcggatctggggaaagaagcattgtccgaccagtcaaattcagaccattaaaccaaaaggttgaagcagtactctaagggttaattttttttttttttggcatgcatgctaattgacttggtgtgtgtgtcgagcagccaatgcaaacccctagcacactctacttcaagagtcgccagttcaaaagggtactactatacaaactggtacaagacttctgtgtgctttcctgtgtcaaactgatcagaggatcagtgtgtggaaagtcccaaggtttgggctgggtgggaagtaggaaagcctcataaacactcaaagctgtgaatggaaattcacatagtattctgtgatcagtaggtaaatagtaacacccaggccaggaacgtgaaggtgaagtgaggtgagggaaaggagacagaataccaagagaagcaaaacactttagctaaagggaagcgacagacctcctccctccaggagagggccagcttgagaaatggaagatgaaggatttcctagtagtgccactttggaaatcactgtgtgcaataccagttagtatagttgcacttctgtaaggacaacgcttggctgttcaacaggcaggaatctgtgcagtagaggaactcggggcccacttagaggcagggtaagttagtctgtgggaatctccgatcatgttccatgcactggatttatccattcttcatctctgctacaagtcaaacatgccctatatcatctcccaaatcacgtggaaaaatctccagacaagcattaagagtaacctttatttgcattcacaaactaggtggactgaacaaaaaacaacactgaaaaacagttcaaaaaaaaacaaaaaacaaaaaaaaacgacaattgccaggttttcactaaggtagggaattgggtagaaagacagcatggaatttggttagtccaatgctgaaaggagacacaagcaaggaagccaaatatcacagcctgccatggctctaggcctgctctcctacacaggtactaatttcgatgaaaaaaggaaaatccaggctacagtgaatcggtgatacttctgcaattctcaggccatgggggtgcttgtttttgtttcaaaaacaagacccaaaggtccatgggtgtcagagttcccagccactctagttgcagtgaaaaatgtacaggaactaggttgaccagaaatcctatagactccagggttgaagagacaatgcatctctgcaggatacgttactaaagagtaaatgtgtgtgtgtgtgtgtgtgtgtgtgtgtgtgtgtgtgtgtcagagaataagcaagcaaggatggggagatctgtaggtaactactgtactcaggtgctcacttgtgccagcggggactcacatagctgtgcattataaactcacagtcatcaagattgatgtatacgcagtcaaggggagagaaaaaaagggcttggtttccaagactatcatggaaaactgactattgtttcaccaaggccaaaaccttacagttgccctcacagtcgttattggtggagttactggtggcatatttggggccatcatgagttccctagctcctattaatcccgtggcctctgtggttaatttggtggtaacctagaaatacagctaattggaaaagtatttgctaggctgtggtagaaaatggaatagttgggggagagatgtgagctgaatgccacagaggatacttggattcaacataaatggaaacaggtattgagaagagcataaggaattggctgcagtgacttctccactgtttcttaccttcctggtcctttctgtcatccctcctcataatgcttatgttcaatggccacagtgagagggcttgaagctagaggacatgggtgttgaaaaacgcaccttaacaacacccctggtttacaggaaaccatgttgaagccatacaagaccttttccttttctctaatcctttcaaaaaatttagaaccgatttcatcatgtttcattatcattccttgcgtactagacttggagctgaaatactaaaggaagtaaatgatgccgctggcgcgggtggcttttcctctggctggagctggcaggtaatatgagcatacctcaataatatgagggggcagggggcaggcagagaagcaggaaactctgggacaaaagacccatataggatgagtgatcgggcaatgtactttctatcccttttagctatttcctgcttgccactacagccccaggagaaatgtcctgcctgatttttttcaagtggcaacagaactgtttatcagatcccctctgagataagtcctctgagtgcctgtagtttacggactcgcacaatcagagaccacagagtggagcttccaaatccccattatttcattccccaaatggaaacaacccatggagaagttcaatgatcctttaaaaaaagaatacatatttcaacaacaaaagagttggccatatcaaccaggatttattttcctcccaaagagacttcatcttaatgattaatgcacattataggatggagaatgaaatacaaacacctctcccttcttgtgtaaagtaggaggagtttccttgtctagatacacagaaacttcaaaagctagcaaagaaattgtgctttaaagaaaaaaaaactacaaaggaaagtgactctggatcacacacagacttagatttccagtctgatgaggcatatccacctcagaaggatttacatgggcatatgttgccaacaggaaaaaaaaaaaagtggagttttatgaactgaaataacactagttctgcctctggtagtagaaaactgacttaccctaaattgctacgggttaactaacttaacttatatcctcttaataattagagaatataagatacttggtaagtggcagactattcatttctaggctcccataatccatgaaacaagtgtgatactaaaaccacaggcaaatttagcatgttgaccaggactccatgactgagcaccttcaaaagagcctcagtaaagagttgattcttatggagtaaatgttcagttgtagggtagaggttgaaatacaaactcctatttcctcttggccatcaagtaagtacatcctcagcatttagatgcctctacagaggaaaatgagactcacccaaagtgggaaatgtttctctttcctcatctacttagtcatagaattttcaaaaagactcttgagcaggatgatccaacagaccttcccaaagactgacttaagaacttatcttttcagagcacaaggcaagtgagggctacccaggttttttttcagagggcaggagctctcagcacaaaatctcactgctagcagttgttcctctgggcatcttcctcatctccaagagggaaggatcacccgctcctcacagcctctaaacttccctgggtttcctgcagtctgttttcccacctccctgagtctggctgccgaaccctgtgaagctacttctccagggtagtggttctcaaactttggcatgcagttggagggcttgttaaaatcttgctgggctccatccccagtttctgatttagtaggtttggggtgggggccctagattttgcatttcttacagtttcccagataatggggatgctgcttatctgggaacaccgctttgagacctgccactcccaaaaaacctttcttgcaactacacactaattataggtgttgctgctcgagaagcttcccattcagacctgaacagagatgattcagtgtttgagccagcccccagataaccagctgcctaccacttagctaattgctgggatcaaggggttgaacagacattttctgtttcagatgcgaacaagggggtgaaaaaattaaaaagatacagggaagcaattgcaatgccactgtgcaagcttcaccagtggacgttccaattaacaatcagagagtacctgctgagcacattttagattaagattaaaaggaaaaatgatgaagtacagatggggaggggttacggagaccatcatttacaagggataaagaaatggtaagtagcttaagaatgacaacaacaataacacacacccaagatgatttactagggacgggactggctgaggaacaagatatcattttgtgaaataatttccaacgttcaaattctcctcactcttgtggctagtccctttctaaattgaatggggccctctcaattcccaccaggattatggacaggcagagttcaggcccacagcaccacagacatgagtcaatgcaataagcctaatgattctagactcttttcctagtctcacctctgcaatgttgccaaattaatttaattaaaaatgtcattcatccaccatcacggtccctgcctgtttcatatagtaactctaagcctggctaggaagaatttctaaaacctaaactcattctacatctcttactttattttctactatgtttcagtccaaacccttgccttcattatttcatgaatgtgacccatgtattccctaattttaaatctatgccttctctgtggcctcttcaactgctgattactctttgtgttcaaaccttgggcagtcttcgaggccaacctccaggcttgattcagcaaactacttgtgccctcattgacctctcccatctctgaattcccatgctactgggaggaaaaaaattctaaactgcctcattatgttcatattcaattattcttcaattcaatgtaataatacctgacaattgtataaaatttacatatgctattgcatttggtcctcacaaaatggcagaataaagtagatattgtactataatccccattttacagacagagaagcagaggctcagatatccaatcaagaccctgcagctatgtggtagagttaggatagagacccactagccttgtgccataccacttcctctccagatggagtgcagccttcttggagaggaagaggaagcataagacatagtgtctgctatctacagagcctcgcctggggctcatgcaaaaatgatgggggttgactgattcataaatccttcatagaggaggacaaactgccctagaaaataactgatgtgtctgttgggtggtctaggaaaatgcagaggaagcagatgtattcaacctgtacctaaccctaaccctgctctgtagagactgtcatgtgggacactaataatccccagaagtcctctctgggaccccgtgtggggtggtggtatcaggaagactgatcccatcggctgaggggaagttcttctgcttatagagggataactcctagttatccaactgattaaagatgaatgacccttcaagtggcccaattttccctcaccctctcctattctaggagaacaaggatgaagataatgaaagctgataatacttagacactctgaagactcttaattatgaactagatgattaataagctttgcatcccatttgatccaatcaaaataaataaaaaagatgatatcatatggatatggatttttatggaatctatctataaccaagagagtaggtctaagtgatttgaagctttcctggctacctctggatatcctggataaactgcctacactggaataaaagcatctagccagccagaatattatgagacagactaattttaaaaggaggcaagtctttgcaatgtacttcaaattagaaactgatattattattcataaaatttaagatcacagaaaaatattttgtgagctaataacaataatggatttagtgtgaatgacatgatatgaattcatcattgagaaagcaataatatttatatagaacattttctcctgaacttgggacaacaccccaagactgccctgaacctgacgggatccaagctgaaagctttgtattcttttggttttcttcatgctgccattttacttatcttatcagagctgtgtacctaagagtttatctttctaatatcgattcttctcatgtttacactggacggggcatgtgtgttcaataagttgtgtagtttttagttttaccaaacagaataaagcctcttcactttatcccagacatcatggaatagttatcttctaagatgtggtcacctttgatgggtcagtttgtggtcaatcatccatcaatagtaatgatgataacatcaaaatgggccccccttttttaatcttaaaacatttttcttagaccttgaaatgactctaatgtaaatagaaaacagtttttgttactctgcagtactgatcgattatgatcccatgccagctggttgtttaactggctttactgggaagtcatcagttatgggtttgtatcaacaggactattaatccttttgatggcagcaggcttctaattatagctctgctcagttgaagagatgtgatccaatagccacaaatatatgtattccatgttgaaatgaattggagcataccggaaagtagtataaaaaccctaacaactctttagcatccatatacactctgtattcttgagctttgagtaatatggagactcctgaaacaatgatagcagttgacttcagagcagttgtaaggctcaggatgtctacctgaataattattcctaagagtaaaacattcttctaggagacaaagaaaatgacatagattgctaacagagagaatggaatatgtcaattctttataaatttctcaataaaacacacacagatcatttgctttcaagaaactcaggtggcgagaacccttttgtttgttatgaagttcttttaaattttatctaacaagacttcaatattatatctgaactaagagtctcctttcccatcttcattccatatttcttatccacgatagacctagataggtatagcaaaagcaaaatacgggcattacaagttgacctcaaaagtggttggcagctaggtagttttagaattcaatggaagagctaaagttccagccctatcacctcctagctataggatcttaagcaaataatttgacctcttcaagtctttgttttctcttctgtaaactggggataaggttacgaattcccaacgttgttctaagactgaatcagatgactcagcactcaaaagtgatagtaatttccaaaactaaggtaataataatagtgataatagtaactgtttgtagaaaatgcccccaaaaggcaatcattcaactgaacaaaaactgataggatcaattgtttctatttttttcatttgtatctgctttactgcctctttatctggtgttgcactgtaatccaaatgcccaacaggctgtgcattgggctactgtaagatttcacaaatgcctagtataattctatagagtattaaagaagaaaaagtgaaaattatatttccatgaaggcagccacacagtctcataaatgctaaataattagccaagatttcttgacagagaaagccataagtcactttaatgagtggccacaggagtttgttattctccttttttcctagtttttttttttagagatgagagctttccttgcctggttggcttagcacggatctacataagaggcagagatctgaaccagtcatatgtcttgtaaatatctcttgtaagttttcttctctaagagcacgtactttttcactgttacacttttggaatgatgtccaagacaacctacccactaatgcttgttttctccagcttatctgcagactacaattatttcaatcacagttgttaccagagtagaattagtgttcatatttgccagcaacttctatgtaataaatcagagctaagctactacataaaacagagtctttccaaacaagtattgcttgattttagttttcactaaactgtcttaggaatcatgactgaccaattctactcactcgttccactccctccactgattctagccatcccttttttttagggaacccttatttatctagaaaaggaatgggatggagtaggtgattcaaatagcactaaatgcatatgcacttatgcacatataccagaagacagagtgaaagttcttcgagggcagggtcaatgagccatgtataggtatggagtggttcatgtgggtgggcacccacacaacgtgtacacacaaacatccccagcctcccagcacaaatatatgctctccatccaaccccaaccccactctgggaccactcacaaaacaggacagcctagatgaggtgattagaaatgggggaaaggaaagagaagagaagtcccaggtctgaatggagagctgagaatctagacacaaatgctggcatggggaatggaacctctgacccctggatccatactcctctcacatctacaggaatttagtcctagggaaacaagaatagactattcatgtaaccactacattctgcttcctatgccttttttttctggatattaaaattgccacctatgtgctaggaggctgataaacaataatctataaccagggatagccaacaacccctagccattggggagcaacagcctggagctcacatttctgaaagagagggcatcctagagaaagtagctcagggtacagtttcaaggcacttcatatcaaggcttcccaaataagaagccctcatattcatacaggggatggcagaggctcctaagagaaaagaagagctctctatttgccaaaggctggccaatcagggcacggttgggcaggtaggctggtactcccatagcataacagactgtcaaatcactgtgggacttctttgggctgttactagatgcagacttcaaaattctgtctgagccttctccagatgtttgccttggactctttgggcctcccctggtcatctcaccagtcccctatttaacttatgccttatactcccttttcttgccctcctacctggctttgacatagtcctgtcatacctggatggcatgaccctggcaatggcaccttgctatgggtctacctgtaaggatttggagtacagaagctaaaactattgaatcgacagctagaaccagcctgttctgagttccggactgacagttgcggataatgagatgcctgagacgtatctctttcttattctgaaccttagtatttcagccagtagcctaagaggtctattacagttccaactcttgtacctcttggcacatctgcactcaagcagaatggcacacaagcccctcagcagggcactcaaggtctacactaacaaagagtaccaatgctgaagacttgctgatcctgaatgtaggaagcctgagaacatctggaaaaaaaaataattatgtttaaaaaacagttgttccatttatctgctgcttcactttgacgaacagaaaacaatgtcacataacatagatagtcaccacaaggacaccagcttgtttaaagttacacatgaatttatatgtgatgctgaaggataattataatggcttatatctatttctaacatcttgaagttttgttgttgttgttgttgttattgttgttgttgttgttgaggattttttttaagaacacacagagaaagacctggtagaagtctttctgacatctggcatagaagacaattatacctttattgcacaaggaaataaaatagctgtgtcttagctccgtctttggctgacagctaaggcctggaagttttgtaagttttcctatttaggagttttgttgagagcctagcagcctcacagccaaaacggagtgtctgagatgctgctgattagaagtcatgggtctgctgagtacaaggctagagtcactccttaggaatgtcataaaggacctgggcagtagaaaccaacaccaccatggaaaatcagacaggatgagttacctttaaaacaaactgtcatcattaatagggaaaatggcaatgacttattaacccctatgattatacaatcatatcttcaagtatgcacacttttcatttccttcttgacaacttcatgaaagtaatgtctcatctcctggaacatttcttttcctttttttttctttccttcttgcttctaattaacattgaaaatcatttatttatcaaaattaggtttcccctgcccatgtttcagaaataataaatagctggctgagtatggtggctcaagcctgtaatcccagcactttgggaggccgaggcaggtggatcacttaaagtcaggagttcgagaccagcctggccaacatggtgaaaccccacctccactgaaaatacaaaaattagctgggagtggtggtgaacacctgtagtcccagctactcgggaggctgaggcaggagaatggtttgaactcgggtggtagaggttgcagtgagccaagatcataccactgcactccagcctgggcaacggagtgagactgtctcaaaaaaagaaaaataataataaatagctatttccaccatatcaatgacatccactagatttttgggtataaatttggaaagaaatatgatgaattacctgctcagtggggtgaagtgtctttctccttgcttcctcctgcaggcccttcttttaattttattgtcctatctttgaacttctctagagatgttattcctatcattataaaaacatctctgtgagaggcctaggatggccccaggaagccgatttcttaggattttctcttctgtctctgtgaatggatctctgtatccccactttctgttgggcttcagaaatcctttcattttatgaggaatcactgtgtttttctgggaaagaggaatgggtctctgtactgaagaatctcacaaaagagaatcagatgtttccttcgccaagcccccagatgaaaacgttcataaagtgagaatatgccaacgtgctgggcaggatcgcctgcctgcacaggtctgtactgtaattacatttaagctcctttcaaaaagcgaaatgctcccattcaaaggatctttttactggttaccaaaagaacatgttatgaaattctaagcaaagtccatttcaatataatacatgggatatggttaatagaataggaggaaaaaggactgtgggaagagcttcaatctactaagcccccagattgtagaagatcagatttcatgaagaaaacctaaaaataagataagaagcattcggctttgtttcattctgactgcttagtgcctactcttgggctaagggatgctgacaagctagtatcatcaagaattgtctaggaactgttattcctaccctaggattatcacagcttggaatgcctcgcctttcatttttctcagcttacaaccaaggcatgtctaaaatgcaaagtatctatttgaaatgacaaaaaaagaaatgcagtgagaaaacagatcctgacagttgtgttttataaaagtccattctgagaatacaagaaagaagtatacaagtttaaaaaaaataaggaaaagaaagcagttttaaagtaagtcattagacagccctaaggcaaaaaaaaaatatttcaaggagagaaaatgatcacaatttactaatcaatgatgttgaatgcagtgccaacatgctttaacaaatgcgatatttcttcctagtagtaccatttcatttcttttaaagttgaattaatagttttactaaacactatgaaaacgatcaataattgcatttcctgaggcatttagcccaagaagtgcttttaaaaggtatatctttttatttagatatttgttagatctaagcaaaatcaaatcaggtaacattattcagaaagacatgaaagggtatcatcatcctggtcacttggtgcacacccaggtggagtcaggaacatgtaggactgatgatcaggtaggttgttacttggaaaactggtcctagcttctaattatttgtcattagtctttgctcagcataaacctaaaaacgggagatttatctctctcttttccaatgtcctagtcttgaattttcaagggacatggtggcctttgtgatatcacagcaaactgagggcccacagggatgatccaggagaagcctcaggcccagtgcttcagtgtattggaatgctcgctgctttaattcatgcatgcgtccagtgctcaccacgttcagggccatcggggaaagcacgtcaacatgcttgggcagtgcaggaaaagaatctggttaacctggaggcgacaaccgaaagggggaggttgcatcatgcaaatgaaaaccacagcttggccttagctgccatgcagaaaggacctacatcaaagagtctgcagtgcggctcctgggtaagagtcgatatgagagaggtgagttacttcagcaatgagagacacaggcagaaaaatgttcaaaccactctaaacagaacactgtacagagcgctggcattacacgcgagaagaggcagctttggggacgaggaggggcgagacagagggaaggtgaggacagaactggccgttactcaatgaaatggcttccctggccatcctttcatatgcatgtatttttataatgtatttcacttcaacaaataacctcatgagagtttttaacatcaaccataattgttaagatgttgtgaaaattcaggagaaacaaggcatcagttacataaagatacacaccatggtttcctgtagttacagttcattatagaagcagagctgaagcgggtcagataaataagagacagttaagtgccaacatccttaacactttggttacagagctcatgatgactctcaaggcgtaatgtagtgttgaaggaacccaacagtcgtgaaagctcgggtggtgcaagggtagggactctatgcatctatacccctgaaagccatttataaccctgaagttaaccacgctctcaagtgaagccatcttttcttcatctcagcatgaatgacaggtgaacagtgagctcacctcatacatattgaccatttagcagaaccctagttacgagcaagattctcaaaggtatttcttatcaaaatcaattcatcagcaaaaagcatatatatgtgatatatatatatatatatatatatatttcttaacatttctcttaaaggagtaataatactgttttaaattcagtagagattcatcaagcttcgctctaatgtcaaggctacactggatatctaaaaactagtttcctgtaaactccctgcttaatataaggcttgttatcatttttcttgcctcttctgccttttatgatctctggtacattgaacacaactcaaaaaatggtacggtctagtcctaactcacaattcctgcctcctagttctgacaggggaagagcaagccccgtgcttataaattactccttctaaaatgttctccaggagttcagccttctgattccctgcgtgtatgatggaggccttgatagggaacttaggtccagtgtgaatgagcagtgcactgcctcactttccacactcagtgagaccttaacatacccactgaaacttgagcaccacccagaacatgggagtgaatgcaggtagaagcaaaacacaggattcctcccgacactaccttcctcattccttgagatgcagctgtttccacttgatcacaatttattctctcttatagattaaaaactcagaggcttagttgaatgacatcttttcaaaggattatctttttgaacaaaaacataatagtctgtacattcattcaacaaatgtctctgagtttttttctttggtgacaggcactatgctggttttggagacatataattcaataagacatgattcttgctctggagtagttttccatttagcagagaagtctacccagattttaatttctggcagcagatatgcaagagcagcttgtttaaaaattctactgattaccttgtatgaccttggataagatatttaatcatgctgtgcctcagtgtcctcatttataaaatgcaaataatacctacctcctgaggttgttgagagaaataaatgagttagtaaacgtgaactgctttgttagtggccagcacatgatggatgctatgtcagtggtagctattatgatcagtagtactcaaatataagtaagaagcaaaggactctggaagcagaagatcgcctctgcctaacttttgcagtaggccttgagtgaggattagaaactcatcagcgtgagaaggcaggggaagggatggaagcagagggctaagcttgggcagagagacagaagcacagagaacacagtgcattctgggagtggaaggacacctcgtatagagcctaagtagattgtaaggttggcaagaaacaaggccagacaggagacggtgaagcatctgtgtgccctggaagcatgtctgctctttatcctataggaaatagggagctgacagaagtttatttattttttatttttattaaatctagtttttgagacagagtttcactctgtcacccaggctggagtgcagtggtgcgatcttggctctctgcaacctctgcctcccaggttcaagcgattctcctgcctcagcctcccaagtagctgggactacaggcgcctgccaccatggctggctaatttttgtatttttggtagagatagggtttcaccatgttggctaggctggtctcgaactcctgacctcaggtgatccacctgtcttggcctcccaaagtgctgggattacaagtgtgagccaccacgcccagcctgatagaaatttaaatgctggagagtggtaccattatcttgtcttgtagcaagttaattctggggacaatatagagtaggaattggaagcagaaggttgtgaagacagaggtcaattagtcaaattaaatccccacggaaaaaagtaacctatgcacatactaagatgagcatcattgttgccatataattacagtatcttaatatcctgggaaataccccttcttcagggcctgctgctgtcagagttctttaggaagaggggattaggtccacagtatcactgaagcaatttcctaaaccacatggttctctctcctaccacggcccccatgtctattgcaggaatctgtgtcatgaagaaatgacagcacatgtctcttaatcttctggaaaaaaaaaaacccaccctagtaagaagctgttctttctgctatttggagagcagtctctaaattatagttagaatcgacataaaatgaacatatttcagtacctcaaataggggtacctggacatagtagacacatgccaacaattatagacaaattacagataacagattatagacaaattgtatacatgtgatcacacccaggcacatagaaaaattacagtgaacacttctgctgcatccactattaattacctaaagaacttggttagtcataccgtcaagccatcaacttaactgccttttaagtgtccatccaaccctgtgcacagttaggatttcatgagcatgttggactggttttctctcacagaatcctgacctttagatttagatgtccttagtttccagagggctgcctgaaagtatgaattctggggtgtgcagggggtagggggtgaggctttcttttggcaggagttgacaagaggaaagatgccattttcaggtaatgtgctttctctttaaaaagtgaccaagtgtgtttgatactcacttagctcaattttaaccgtggtgggagctctgtaccctatgttggtaaatcagaaacaggaaagttctgtctgtgtgctgctgtgaccatgcggtcatatttgtttggtggatttccatttgttccaagtccattctagtttggagtttccatgaagccaggccaagtgtacaaatgctaacacagggaaaaagaaccctctatacatggacttacggagaagacaatacacactgaacttggaaaaggagcacaggctgagattccctaaagtggcagccaccttgctgcacagcagacactcagggagatgctccaggcagcaattgctcagcaggaaggcatgctggggaaggacctcatttcaaaggagagtagaacaggcctaagtgctgggattacaggcgtgaggcaccgcacccagcctgaaattagtattattttaaagttcacgcatgtgaccttataaaaatgttggtgcttatttttaagttatttctttttctttttaaaatttggtttctcacaagagaatttcattgtgctgatggaagagttctgtatactgactggagaggtaataaaacaaatttatgtgggataaaatgtcttggatctacacagcaaaaaaaaaaaagtgcttgtaaaaactggcaaaacatctgtacttgagtttacagcagtacgccaatatcaatttcctggttttgataacataccatgcatgcctatgtagcatatagcactatcatggggaaagcttggaaaggatacagaaactctgtcctgtttttgcaacttcttgtgaatcttaaactatttcaaaatgaagttctaattttaaaaaacagttattctcctgtttggttttactgtagccagacatcaggctagtggtctatttctggtgatatgtgcctctaaatgtctacagactgatttctttaacaaacatttactcagcacctgttataggtataatactgtgttcaattccaaaagatataaaagagggataagaaaccacagtgatacaaatcaacattaactatcttagttcctttctcaaaggagtgctaattgaggcaaagacatcatttacctactgcacaaattctcagagacaatcccccaagataatcagctgtcaataaatgtaggtcgttaatgtaataagcaagcttctagaattaacccacagtaatctcttcaggtaagcagatatcaggtaacaagctgtgctgaataatgcaactgatgtgataatgactctcttccttcacgtacagttggtgcaggctaagccatccttttccttagtttttcagtccctgttttgtccttcccagaactcagtgctcaccacactgaggagccaacaagtgatacctgcttaatgaaggtgcagggtgacactaagagctacttagattttaagaaacaactgaaaaggcttcaagaatgaatgtctaattggtggaatttcaggtactttgcaagttagaagagatgttttggagtataggagtatttacagcaccctcaaactcacccaaggatggccatctaccacactctctactaaaataagttgtcatgggcaattatattggaagtaaagtcaaggccaaatgaggcaataaggatggatccttagaatgccaaagactttgcaaggaacatgtcaacagtttttatcattctgagaagctgcctctaacaggaacaaaaagaaaacagagaaatgtgcaaagaataaaatctcctggaattgaagcctcagcaaatgaatatccaggaagagccaattcaatccttcctgaaatagaagatgtgtcactgctgttaacctgacaccgttattacctgcaagtggcttgggcttttaagaagtctggaagtaccatctttttcttgctgtttaaaggataaacaactagaacagctcaatccgggaacaaatgaatttttcaaagcattccccaaagaactgggaaactcctgctatgaagaagggtcctatcctaatcacaacaatttttaaagaagttttgtaacagtggaagacagaagactcccagaaatatttgacatctgtaagaatgaacagcagctaagaatggacgggctgctgcattcactcctctgtttcacacccatgctattcccttgcaagctcttactcatccacctttgaacactcaactcagtggctgcctcctccagaaagcctcccctgatcctcctcccacccagaggtaactgaacctttttctaggcttttcttcctgggtgcttctgttgtggcgctcatcactcatgaagtggtaatttatttgtttgtgtatctgtctcccttccctgctagactgtgagctcctgaggggagagccttggtgttttgtgtctgggttcccatcatcatggtacccgcaaaataggccctcaatacatgtttaaggaggaggagaaaaataaatgaattgagggagaaaatagacaaacctggaggaaactgattataattcaacagtaccaagatactagggaagtcccatctcccaacatggtttcaaatggccccatagtcccataccaattcagaacttaaattaggctaggcgtgatggctcacacctgtaatcccagcactttgggaggctgaggcgggcagatcacttgaagtcaggaatccgagaccagtctggccaacatagtgaaacctcatctctaatagaatacaaaaattagctgggcatggtggcgggttcctataatcccagctacttgggagactgagtcaggagaatcacttgaatccatgaggtggaagttgcagcaagccaagatcacatcactgcattccagcctgggggacacagtgagactccctctcaggaaaaaaaaaaaaaagaaagaaagaaaaaagaacttaaattatatgacaattacatcagttacaatattactacaatccctagaggatgaggtgcattcaaaggactgatttgtgtgctcttcccgtgtttcaggggagtttcaggttatctcacctcatgtgtgcaagaagaagaatgggaatgaccttggaggtaacaagattcaccactcagcaaagccatttgacctcactagccatgagaggtccaagacctgagaaggctatgggatagttaaaattccacaggagagtctccccgagggcattcaatttctgtgtcattaggcatcacaaaatctaaatgcctaaaactaaaaaaaagtcattcctctgaaactaatgagtatgcacttttctccttctatgagggttatcttctataactgggaaaccaagattgaaatgaagttgcccctgtaaacattataaaattaatcagggaagaagaaaggggaaaaaataaattaataaaccaagcttgaagcacattcagcattaagcatgaggtcaactcattctctgacctgcttcctcgacatggtttggtgcctattgtcctagaatcatgtagactctgtgataagatgatagttccccttaagtgctctatagataacaacttgaacattaagaaatgttaagctttccccgtgaggtagtctttcaggtcctgcatacgagtgaaactactacatcagctgatctgaatgaaagaccccacgggtgaccccaggaaggtctgaggaacaccacaagaagctgactcaccaaagaacacaatttccacattctgatgatttaatcccccttcccctgatcagtcaacaaccccaattttccagcccatcacgctccatgatgttcttaaaaaccacagcccagagctcctcagaaagatgaatttgaggctctcctcccatctcctcccttggtgccctgagatagttaaacccttctctgctgcaaacctgctgtctcagggtaatgggtctgttactatgcagtgggcacacaaacttattggttctatatcagaaataatacacagaggtgattgaagccccagttcgttcttctctctttgcttcaaatgatatatttttttgtgctctagctcaggaagctggacctaaacttgacacgaagcatactaggagcaaagctaaaaatctagagatgtgtgcatatcaaataggaggaagtcagctcatgtttctcttgctgattcatttctccaggaagccaacccaaggaatcaggtgttcaagcaacaatggaaaaagatgaattaaaatctccacataagaatacatagatgaagaggagtgtgggtgaggattttaacccaaagggtctccttggagagtaacttatcttactggatataaatcaacatgctctaatttttccagtaaggctgaatatatttaaaccttcaaaaaatatagtaatttttaatgcagtcttagattgatgaaggtttcttatagtttttactccatgctgcatatatgatgaagattccattaggaagtccatctgaaccaagtatttaaatcacttaacattaactttcctttgaatttgtcctctcatatcagcctagattttgataacctgctccttctagtcatcactctccctaaatataaaaccattttttaaaaaatcaggacgactttttaaaagtctatgaaattgtaaaaatttgtagagttatcactagcttctgaagtgacacctctgggtaggcaattctacaaagactatttgtaactatatgagctaatagtatagaagcagtgatgtaaaactgtattatttgtttattatgagcaacagaataatggaatgaattaatgcaccaatctcgctctaatgaatctatggacaacatgacagtatggtgtgaacagaacaaaataaaaccattgagtgggtccatttgcaaataagcccatttccccataaggcgagagaacatttgtttaatttaaagcttaagaacaatctctttacatacaaaatactttttctcagttaaaaaattataagtgctaagacaattaaattaatacagcatcaccatttttaaaactgaaaaaaagaggtttaattaatctcattgtgttctaactcactgttaaatcaataaaagagtttgaaaaaaatgtgtcaacctgacgttggattcattgtttttctatttagtagatatgtttaagaattcattgagtggtgttgtggagtttaaatgagttaaaacaggacaagggcttagacagtcactggcactgattaagggctcattaactgttacctgttgtcaaatgtaaagtcatgcgccaaacttctatctgctcttggtttttcgtctaactgggaactggacctcttgcctctacgtaagtctcctaccacccgtattactctctctctttcccactgagctctaaccatactcatcttctttctgtttcttcaactgtccaagtttttggccatctccactggaatgcaaggcccataaaagcagaaaacatgtgtgttttgttcactgtttcaccaaaacctacacaagtgcctgacacagactaagtactcaataaactttgctaaacaagtaaataaataaatggagagccaaaggaaggaataaagggaggcagggagggaggggggggcgggtcttagttcattctcactaagattaagtctatggtcaatactagtttgctagtgtttcctttatcaaaccatgcttgttattaggatcaggctgctcccacctcacttcctatgtctatatgatttttttgtactcacaaaaaggattttcctctcttgcattccaacacaaggagttccttgacaatttaatattatataatatatgcacctggaaagatgtttgacatctaatttttgacttacacttaaccacatatttccgctttcatttgaaggcaaaatggaacattttcttgtcaatttttttttctagattatgtgaagaagaaattaatagtcttgtcccatgttaatctaaagctcttctgattacataaatttaatagaggactctccctaaacaaactttaattccacacttaaagtatctttacaatgacaaaattgttctgcattctatagatattggaatataacacattgcataatttagaggttaagaaaatggactctggattcagaccaggggttcaaactctagttcctattactaaccatgtggacattgaaaccttctgaggtgttctttcttcatcaagcaaataaagaaaatcgtagtagtgctactaagtagaataataagtttgtaaaaggcttatcatggcactttgcacctagtaagtactcaataaatacagaagctgcttgtagacctagagagagcaaactagaactaagatcagaatcccctaatgatagccaggcaagccagtacctgacctattgaacatctggtagagatccactgagtgaacggctgctactggtgactaactgcatgacagcctttccttgtcttcctcgctaatgtctgttcaggttgtgtggcccttcctatactgatgtgatgtattttgtagaatccctctccttgagcctgtgatggccaaaattgcgtgcataccataaatgcttaactaggtaaaatgcctttgtaagactctgatgttagtccctgctgacaactttctacctcactacaatccactttaatctttgcattgacatttctgtttagaagagcaagccaggaatgatggctctgggctgagaatctggaatgcagattataactgctcagcaagttcgcttgctttgtgtaaactggccgcacttcttttgtcctcatttggaaaatagctttggctgcttgatatcgccacatcttccattttacacattctcagtttctgacaagaaaagtagagagtggaatgccacactgttgcaaatctgcggatacgcatcagcttaaccttatttgttctggtggatttttgtagatgagaatgaatatttgggctacaaacttccagcttgattcccttctcttagttccaatttcccagggtttgtttgctcaaatgcccaatgtaagagcactactctattctaggggccaccttccactgctgtgggttgacctcaacaggcattaaacctgtatgcagagccaggcatggtggcacatgcttataatcccggctccttggaggctgaggcgggacgatcacttgagcccagaagtttgagactgcagtaagttatgatcacacaactccagcctgggcaacatagcaagaccttgtctctaaaaataaataataagtaaataaaacgttttaaaaacctgtgcgcagaaatgaaagcccatgaacagcaaaaaaatcaaatgcaatcctggagctatgcataaaccaaaggagagatgaatatgtctagattaaagttctttagcatctactgtccatcttatgggattccatagacaaacatacagtagaaaagctcaaaataaaatggctttattctatatttaaaactacattttttccttatttgtgttattgcagactattagtttttcatgcacaggcaagagctaaacaaatacactgattccccaatgtgaccctctatagcatcaagacctatttttatagcagtgtaagtacatgcaccaactattatgtgttcttatgaagtaatcctcatcctgtcaactgctgtaagatcctggggaacatgctgagcaatgctggtgttctatggttatgcagtacttggccaagctcagtgggtaatttctcctaagtatatatatgcttaaatggcacctaccaattatctctctttggaagagtgcaagtgtagcatgcccactctcccagatgtgtgcacattcccgcctccacagagctgtctcttcgcctctcctctctagaagctctgggttagtcctttctccaggcacagaggcagctgagtgaactcagcctaggggagctatcactgttcttttcttacctctaggagttacaacagagaaaacctgttctccagaaaaagaccaccctctacaatgtcttcataggaaaaaaaatggtcacacctgtgacacagccctaattgaattcttataggcacctcagatcaaagctacccaataacctgaggtaatggaaaagaaaaacaatagagtatgacatttattcatgtaccaaattcttggtttctcacctattaatttttggtcttgcaaattttgctggaacagaacatgatagagtactggctctgaagttctaggttcagataacaaactcaaaaggggtttaggaaactaatccaagggagaatcataaatttgaaccttaacatggactctgttctccacattaaaatatattgtactaccttttttcatataacatatcaaagaaaccaagagttggctcttcgaaagaatatacaagaatgctagacagctggccagattaacaaaaaaagaagattcaaataagtgcaatcagaaatgacacagatgacattacaactgatcccacagaattacaaaagattctcgaagactattatgaatacctctatgcacataaattaggaaatctagaggagatagataaattcctggaaacacacaacctcccaagattgaaccaggaagaaagtgaaaacctgaacagaccaataacaagctctgaaatggaatcagtaatttaaaaaaaacctaccaaccaaaaaaaaaaaaaaaagtcctggaccagatgggttcacaaccaaattctaccagatgtgcaaggaactggtaccaatcctactgcaactatgccaaaacactgaggaggaagggctcctccctgatgcattctatgaagccagcatcatctttataccagaagatggcagagacacaacaaaaaaagaaaaacattaggccaatatccctgatgaacatagatgcaaaaatcctcaataaaatactggcaaatcaaatccagtggcacatcaaaaagttaattcaccacaaaccaagtaggctttatccctgggatgcaaggttggttcagtatatgcaaatcaataaatgcgattagcattataaacagaattaaaagcaaaaacacatgatcatctcaatagcctcagaaaaagattttgattaaatctaacatcccttcatgatagaaactctgaaaagagtaagcatcaaaggaacatacctcaaaataataaaaaccatctatgacaaacccacaaccaacattatactgaatgggcaaagctacaagcattccccttgagaagaggaacaaagcaaagactcccgctctcattactcctattcaatatggcattgcaagtcctagcctgagcaaccaggcaagagaaagaaagaaaaggcaaccaaataggaaaagaagaagtcaaactacctctcttcactgataatattactctttacttagaaaaccctaaagattcttataaaaggctgttataactgatcaatgattttagcaaggtttcagaatacaaaatcaatgtacaaaaatcagtagcatttctacacaccaacaacatccatgctgagagtcaaatcaagaacacagtcccattgacaatagccacacagaaaataaaatacctaggagcacagctaaaaaaggaagtgaaagatctctatgtggagaactacaaaacactgctgaaagaagtcagagacaacacaaataaatggaaaaacatttcatgctcatggataggaagactgaatattgttaaaatggccatactacctaaagcaatttacagattcaacactattcctatcaaactaccaataacattcttcacagaattagaaaaaactattctaaagttcatatgactccataaaagagcctgagtggccaaagcaattctaaacaacaaaaacaaaaacaaaaaaacaaagctggaggcatcaaactaccaacaaagctggaggcatcaaactacctgacttcaaatatactataaggctacagtaaccaaaacagcatggtattggtaaaaaaaacagacatatagatcagtgggactgaacagagaacacagaaataaagccgcacatctagagccatctgattttcaacaaggctgacaaaaacaagcagtggggaagggactctctattaaataaatggtgtgggtataactggctaaccatacgtagaagaatgaaactggactcttacctttcaccatgtacaaaaattaactcaaaatggattaaagatttaaatagaagacctcaaactataaaatctttgaagaaaacctaggaaatacccatctcaacatcagccttggcaaagaattttttactaagttcctaaaagcaactataacaaaaacaaaaattgacaagtgggacctaattaaactaaagagcttttgcacagcaaaagaaactatcaacaaagtaaaaagacaacctatagaatgggagaaaatattcgcaaactatgcatctgacaaaggtctaataactaggatctataaggaacttaaaaaaattgacaagcaaataatcccactaaaaaatggacaaaagacatgaaatgacacttctcaaaagaagacatacaagtggctaacaaacatgaaaaactgctcatcatcactaatcgtcagagaaattcaaatttaaaccacaatgagataccgtctcacaccagttagaatggctattactaaaaaatcaaaaaacaacagatgctggcaaggctgcggagaaaagggaatgtttacacactgttggtgggaatgtaaatttgttcagccaatgtggaaagcagtttggaaatttctcaaaacacttaaatcagagctaccattcaacccaacaatcccactactgggtatatacccaaaggaaactagataattataccaaaaaaacacatgcacctacatgctcattgccatgaaatttcacagtagcaaatacattgaatcaacctaggtgcccatcaatggtggactaaataaagaaaatgtggtacatacacatcatggaatattaaaaagccataaaaaagggtgaaatcaagtcttttgtggtaacgggaatggagctggaggccataatcctaagcaaattaacacaaaaacagaaaaccaaacactgcgtgttctcacttataagtgggagctgagcactgagcacacatggacataaacatgggaacaatatatactatggactactagagaggggagggaaaggaccgtgggttgaaaaactacctattgggtactatgctcgctacctgggtgcaatatattcacataacaaacctgcatatgtaccccctgtatctaaaataaaaactgaaattaaaaatatatatttttaaaagtactgtatgtatactacttttaattatgaaatgccaatttgttatattctctctctctccttctctccctcccctgctcagtgtctcttgctcttttctctctcttgctgtcttctcttccctcttcctcattaagctgtatggttaaggaaatgagagcaatctctgcttcaaggcacagccaagaggaatcagcgctcttgactttgacatcttcaattcctactaccacacttcgtcagagaaaaaaaatgacaggaaacttctagacaagatgattccctgccattatccttaaagatctatccaaatcacatcattcctttcacttgctaattggtttcgtaagccttcttcccttccttatgttttctattcttatttttgggacaattgccgacgtatgcatagttctggattttttttttaagtaatttgtagttgactatcgtttatttctgcaattggtgtaattaaatctaattacataatcggtgaaagactgagtaattacataattagaatgtgcaataataacagttgaaatcctattgttatgacgtgtaatgatacaattatgatgtataacattcacagggtactctgcaacgagcaaaaacggctctaaccctggctgaatggagcacagctaaagttggagacctggaaagtagctttcagcacctatacttggacttgcttatcatccttatccccctaatgtatcctttgacttttatactccacaggaatcaaaggcagtaggcgaggtctaaggaaggtcctcatgagggcaggagcactcacatctccaagaaccaaatcaccaatacaatcagcccttagacagaaaggagcagcaagagatggactcacatttctgaaacagtcactcctgcatgtcagttttaagtttgaaactgtaatcaggagacaaaaagttagggttggagaatgtctggtgatcacacacacaattacaagtgggcctagtgattatggcctgggacatagctcccagctctcagtctgccctctccaccccaactccagtcatcttaatcaccaggacatagaccaaccaccagaagtgctggcctcccaggtccttgctctgctgattgtcggtgaccctttcctttcctccacgccacccacccactcccatgatcttgctctggacccgaagaaagcagcaactatagtgtttctgatatctcggcctcaaacaccccattcatcaacagcaacctctcatccttgtgctcgcctgttcacgtgctccccactgggacccttccccaacctcagagaaatctccaaattctggacacctcccccgacatcccacccctggccagtcatctgctccctgccttgccttgcaacgctccttgtccagcctaattcccatagtccaccattgtcatcacccctgggcagcaccctccttccataacagaagccctcagccctacttcacaccagctctggaaagctgaaagttcctgaataaaaccacacaagggaaatgactggtttcgctttaaattcatgatctcaaactgcaaattgacactccatactgactggcaaactgctatttttcttgaattggtttgctttccaattttccaaggccactatttcacagttttccttctctcctccaacctcccatgttcttttctgcaccatcaggctcagtggatggcctcgcctcatcatgtcattaaaagtcacataaaagaatcaggccagttacactttttttcctaccagcagctctccaacactgcacttacaggcgcccagcacatcctctgcctcttcattcataacacaccatgccctccacagacactctttcagccctgtactgtctaactgtactgtgttgctatagcaagctctcccttgctgctggagctctgctgccaaaatataagcttgctcaactgtcctccatagccaaccacatttccagagactactgcaggctccatcctttagcccactttgatcaggccctccctccactcactagagcttcaatgtcaaagaaaccagcaacatccctgtcacaaactccacagatgaccctagacccttaccttccctctgtctcaacagtgcttggcaattggccactccctctgcctgaaaccctctcctccctaggcttctgccatctccttgccctgtgtgtgcccttcctcagtttcccatccagcctcctcctgctttactcaccctctaaatgttgggcatcctcttgccttcacctggggcaccttctctcctctccctacactctttccccagatggtaccatcaactcacaggcattcaaagtcatctttgtaatttccaaatgtaatatgattcctctcttctgagttctggactcaattatctaccctgctgtttgacatcttctctttcaggtgtcacagacttcttaaactgaacatatccaagatggaaatcctgatttctccctagtgcagcccttagcccccagtgcagcccctcccttcccagtaaatgctaccaccagcgacttgtcattgaagccaaacactagaaggctagaaggaccctgattcctccttccattcactccacatccaattcatcatggagtcctgtccaaaatgtctttctcctctttaatttccctacttcaccaccccactagatcaggccagtgccctcttctgtcgggatggtcttttctttatcttctgaacatgattacagattgcacctgttttgttttgttttgttttgtctgtcttttatttttgcttttttttttttttgcctgtctcctcctctagactgtgttccctgattacatttattgttttacttatttacagtttccagcatagatcaggtaattaactttcattagataaataaataaatgactatggtattggcatctataatatgcagactatgagcctcatggtaaacttataagggccaagatgaaagccagggccagagcagagataataaacttagctgaaagctactcaaaaagttaaacatcgagataccatatcttgatgtgctatgaactggattgcattcccccaaaattcatatgttgaagccccagtccccagtgttatggcatttggaggtggagcctttgggagataattaggtctaatgaggtcatcataagagtggggccttatgatgggattaatgtccttgtaagaacagataccagtgagcagtgagcttgcccctcccccccacctgtctctctctctctcctctctcctctctcctctctctctctctctctctctctgccgtgtgaggacacagcaagaaggtggccatctgcaaccctggaagagagccctcaccagaaattgaccatgctgttgccttgatcttagacttcttagcctctatttctatcttgaaaacatcatgctaattgaaagaaggaagtcacaaaaagccacatattacaaaattcaatttatatgaaatgtctagaacaggcaactctatagagacagaaagtagatgagtagttgcctagggctgagaagactgggggactgggagaatgtggaatgattgccaattgatatagggtttctttcgggggtgttgaaaattttctggaattagattgcagcgatagttgcacaaatctgtgactatactagaaaccactttaaatgagtgaattctatggtatataaaacatatttcaataaaactatgaagaagaaggggggaagaggagaagtgggaaggaagggtgagagaagcgggaggaagagaaggcaaacagcagcagctcaaattagttaacctagctgagttagtctatggaatctaagttgccaccaacaaaaaagtaagccactgctttatatgccaccaagaaagaaaatatttaccaattatagccataagaagtcatgaatgatgagacacttcctgattttggagattttaaactatgaaaaaattgtatcttagaattagtaaaatacagtacacgtagctgttgtcagatctaggtaccagcttctgaaggcttctaaatttgaattacttctttaaagataatttattaaccatgaactcattcattcataagaaaaaattttatcaaatgagtattataagctggatattggctttatatatggttttgactctgtgcacatcattcatttaatcttcaacaactacccttcaagataaacattatattcctcattttatagataagggtgtgggctacagaaaggtcccatagttcttaagtggcacagccaggatcctaagccatgtctccaggtctctgctctgtccctgtgttatgaatgaacagttcagatgcagaaaccttgtgagcaaaaactgaatttttggccaggtgcaatcttaatcgctcacgcttttaatcccagcactttgggaggctgaggcgggcggatcacctgaggtcaggagattgagaccagcttggccaacatgatgaaatcccatctctactaaaaatacaaaaattagctaggcatggtggcaggtgcctgtggtcccacctactcgggaggctgaggcaggagaatcgcttgaacctagaaggtggagattgcagtgagctgagatcatgccactgcactccaacctgggtgactctgtctcaaaaaaaaaaaaagaaactaaacaaacaaacaaaaaaaaactaaatttttttctaagccaaatgtttcctctgtcagctttagagatgtagatgcccatcaatcccatcatctcaggccttacttctcacatggccaacttctcccaacatcaactggtatgtattaaaggaataggaattacagtacatttctggagaatattcttggccaccctggaatttcctgcattcaatatgttggtttgccatgaagtctccaggagctgccgaatgaaaacatggagatacttacagatgacacagacagaacaaagtggaaaatgagaaacaaaaggagaaaaaaagtggtatgaagtgcagttgcacctcaatttatgctgcagatgctttcttgaaaattatgtgtagatcaaattgatttatgaactaaaccctatcataaattcaacaaaagcattgtgatggaaacttttgtaatcagaaaaatttatttgtgctgagaatagttgattctcagcctctcttttgaatttacttgttattcttctcaaggggagcctacctgcacataaaagttcgataaccaccagggattcttgatgtgcaggaatgtcatgagaccaaaatgctttacaaaggcttaaaaatataaactatctatgccatttataatagccatttccataatactttaaatatatatctcaacataatgggagggttgagaagatccttctcagggatggaattctaggaccactattgaaggagattatttgcgtgggtggggaagttcagaggagataagtatctcccctgggtaaccaaaagccctgaacccttctctcttgacagttgagagggagggagaagttgaaggagtccagcactccatttccaaatgactcccatggcctccttgcaaattacaacgtcactagctccctggtcttccatagccaaaggttacaaaatggccacccatacaggccatttaaaccatttaaaccatttaaaccatttaaaaccatacaggttttaaaaatcaagtgttacatttcttaaaatggatttgcagaattacttgaatgaataaaagatctgcaagacatgctccatattcccactggggaataactcactggagctgggtagatgctcctgaagacgtgtctcctggtccccactacttcttaagccttgcatccagcctggctcctgcaggcattttcacttgcaccccagtagaagtctcctctgagctaagggtcaccaccacacgactcacccaatcccatgtagagcccgcaaatatccatgatcccaagagcatcctttctttaatgtggtctcatttcaaaatatatgagactgttggatttatttatttactgatttatttatttattgagacagagtctcactccatcgaccaggctggagtgcagtggtgcaatctcggctcactgcaacctccgcttcctgggttcaagtgattctcctgcctcagcctcacaagtagctgggatcacaggtgcacgccaccatatccggctaatttttgttttttgggtagagatgggatttcatcatgttggccaggctgatctcaaactgttggcctcaagtgatctgcccgcctcggcctcccaaagtgctgggattacaggcataagctactgcgcctggccttattttttttattatttaataaattttttagagctagcccaaattctttcagatcctctgttcttgaagtgccctcctggttcatttcgtctagtgacaaatatgactccatatcaccactttcccagagaatcagcacagcagccatgcctccagagcttttgcttcacagacatgcttaataaattcactttaccctttagaccacagggcttagaaaggaatgttgtttttgttgttgttgttattgttctgctttccatcagcttaatacaatcgtgacgacatgcttctaagaaggatcctaagacgttcatttctttgaagcactattaccagtggagctgacaacaaaaagttaatagacataggactcaggcactcaggctcactctgcttaaactagcggagtggggaagaagagagacgtgtacattccatatccataccagcctggggtcttgggttctaagaggggtggtggcttttccctgagccctaaacccagcagctgcagttagtgccaaagattatgagggtacagaaagtaaagaaagatcagtgttttaaagtctccacccaccatatgatttctcagaaacctcaaatgtcctttgttgttgttgttcgttttgttttgttttgtttttgagatggagttttgctctgtcgcccaggctggagtgcagtggcgcgatcttggctcactgcaagctctgcctcccgggttcaagcaattctcttgcctcagcctcccaagtagctgggactacaggcacccaccaccacacctggctaatttagcaacctcaagtcttaatccatataggaactgtaagaagactactggtttgtttctcatcactaacatggtaactcatgattgccgaacactggctgagcagtcatgctctgcccagtggcattgttttctaagaacttaagtgtatcttctcattatcctcataaaatccccattatcagctccattccacaagtggagaccttgaaacttagagagcttaaataataataataactaaaattcatgaagggtgcccttctagcccactacacataccaggcactgttctgagtgtttttatctgttgactcaattaatcctcataacaccctttttgtgttactatttatgttgtcttcatattacaaatgaagaaactgaggcacagggaagaggtgaaataagatcacttagctggtgagtaattaggcagaacttgaacttgggcagcttgacaccaaagctgtgcttttactgctaggctgatttgctcaaagtcacaccactggttaaggctggagtttgagtctactccatgtggtcagaatctagagccacaggggcagccatgtgctctgcggcctgcttagatgttcatggggtcagatttcctctgcagtggctccaacggctggcagcagggtctgggatggatgtactgcctttctcagagctaggctgggaaaaacatttccttgtcatttattttttaaatgtcaggagattttaaaacttctaggagagcagataagtgataagaagaaaatctgggtcgtttttgtgcatacaaaggggccattctaatagtggtttcaaggggtcttttctagacaaaaggggaggagattgttttagtagccctctcttcctttcctggggagtttgaaactatctagttttgaaatctaaaaatccccaagctcttggatctggtcctttttacccccttagccatatattccagtttctgctaaaaaaagtctgcctcaagatataagtgacatccaactgttggggctgttttctcttttcatagaaaccagagcttctggggttctgagatgtctctagcggtcactgacctaaccattagcaactgggttctacaaataatgtccctggggaactcaataaaattatcaatcgctagcccccacaggtcttaatagagagtggataggtggaaggtttataaatcaggatgagtcatttgattcaccaagggaaaagataaataaaccaacactccaattaattttaacctgaaaagaaactgctagtgaatggtgcgttagccaagtccgtagggtcttaacaaccttaattattcacaaatgcaaattgcttttactgcttgctaatttcttcatgtcttccatccagttcctcttcccctcaccatcctcctctctcctcacccagtctctttattcctgaagagccaaaaggaaatttctggaaatgaccttctaatcactcaagctttttctctaaaaaaatttaacgaatcttcccaagaccctaattagcttaacctgggatccaaggactgccctaggcctaaataatccatagatgcgcttcagggaccccatgagctagctgaaattatatgcaaaattgtgggggtgggtgcaaaaaaaatcagaaagaatgaataagacctactatttgatagcacaagagggtgactatagtcaatagtaacttaattgtaccttttaaaattaactgcaagagtgtaattggattgtttgcaacacaaacgataagtgctctaggggatggataccccattctccatgatgtgattattacataataagtgcctgtatcaaaacaggtcatgtatgccacagatatatacacttgctatatacccgcaaaaattaaaaattaaaaacaaacaaaaaattgtgagggtagggtacttcctggctccctgcccacccaagaggtccaattttcatcaaattctcaagaaagtctatgttctccccaaccccctaaaacagcattaagcattaaaggactagactgtacccacctaaacactgcatcacaaggaatatttatgatgcagagtgagacagcccaggcttaggagccagacagatgcaggttcaaatcccagctctgtcacttacgagctgcatgaatttagacaaatgtcaaattctctgagcctatttcatcatctgtaaaatggtgatcataactccttcagtacaggattattgggtgactatacaaaataatacgagaaagcacaaagcatttgtacatagaaagggcaaaatgaaaatcctccctacaagagagagaaaaaaaggcagatctaggctcaggagtagagacgctgctctcccatctttgggaactgcatttctggctttgctaaagatgaaggtcactgtactacaaagacaatcagattgggatcacccctgggaaatccataagaatcagattggaagagcactctttatgagcatcatattagattataaacctttttatagatcttatagtgacatgcccaatctgatttaaaataagcctctaaccctctattctcctactgtctctacctactactcccaacataatgtgataagcaaagcctaaacatttcaatcatgtacaatgtgaagttgcaccacagtaagggcactgaaatgacctcaggaagcccgcatagccagatgtctgcagtccttctgcaagatcccaatattttcaggttctacctgggtcagttcgctgctctggggtaaatatcaattagaggcttctagatcctttggctgttgggacttccagaacagcatcaatgacttcaaaaacatcctgaagtcgattaatctgctcctgttgtatgggctagattcctgattccagagaacaggccaacagaacgcaggccaagaggaccccacctttgcatttctatttctcatggcaaggttgcctcactcccagaaaaaagaactttagctttattatctgagacaggcagaggattgaagctgattgccattctctacatatctgattttatattatgattgtattgtggggcatgctactgcagagtttaactgcattgaaatcattatatcatttctctttggctataaagaattttaatttggggctgggcgtggtagctcacacatgtaatctcagcactttgggaggctgaggcaggcagatcacaaggtcaggagttcgagaccagcctggccaacatggtgaaaccccgtctctactaaaaatacaaaaacttaaccgggcatggtggcaggcacctgtagtcccagctactcgggaggctgaggcaggagaattgcttgaacccgggaggcaggggttgcagtgcgctgagatcatgccattgcactccagctctgggtgacagagcaagtttccatctcagaaaaaaaaaaaaagaattttaatttggaagccattcatagtggttgtagtttttgctcagaccatgttgtgacacacagtgtattggcttttcagatgacattaacccagccacctgctcatcttggtcctgctcagttaacctgcacatctgtatttttgtctttaaagtctttattatcaacctcactccccagctataaaagctgtttgtcccccaaacaagttgaaaagaaagtgcagaataatcagagtgtatctagaatgaataaaaaatgagaatcccatgacatccaagatgggatacagtcttgattggacatacagacagacatggtgacagaaaactcagaagccgggagggtcagagcgatggagcttactagaacacaagttcattttctcaaatgtgagtgttttgccctctctgattggcatgccttttttccttcctcaattgtggggcactgtcctctaaccacagatgacttctttacaccgcacggttgcagatagcacagtttcaaggagggtgtgcttggatctggtagaggtcatggacgaagtgaagacaaaagtgaagtcttggtggtactggttcacgcaaggaatcaaacagcccaatgagtcagagatctgctaagtatatggaagccttcatgacttaaaatatccaactgccacgagagaagttccagaacagaggagcctcttccagcatggacccagcagctacaggagggctcagattgcttgctctgccacgcctctgccatctgccccctgctgaagtcaggccagggaagaggtgctgcccatgagtcagccattctcaactgctgcttctgccttctcactttgccatatttgctccctatctgggatggtacagttccacagaccctgatacacctggggttcagcagacctaattagccttacatgtgtctgctcccaaaatagagagtcatttattccagtttctgtcctgatcagcaaggtgtgacctaggcccatggcccatagccccagactgggagaggagccacattccttctgaacagtttctaaaaaactttcagtcccaaatgagtgactttagaagtggagttttgaggatggagctgagcacgtggatttcacatcttctcctcttttcagtatagctctcaagccccctggatgcaaaggcaggaccctgatgaacttgccttttctatgacagtctttacactacaagaaaggggctgcaggacaatcccagctcccaaagacccagcccagagctcaggaaagccaggctgcttctcaccaaaactgaaaaccaggacaccttgggaacactcaggaccccactcaggcaccagctccttccggcagctcttccttaccctgctgaagtgctgaccatccctgcccttgactcactcccattgcagtgccaactcagagcatctatccccaaagccagagtttctgggattcagatcttggaggtgtcacccattccctatgtgactctgtgggagctacttagttaatctgcaccctaatgtcctcatccatcaaatgtcgatgatgacagcacccatctcacagacttgggtaaggctcagaagagctaatataaagaaaatgcttagaacgtggactagaatagtaagcactcaacatacttcccatgctgttgttggcgccgctgctcccacttgtcagataccatgtgagaccaggagccccttgaaggtgggaaactttttctgtttacttctatggtcccagcacccagcacagagcatggtgcagaaaaggctcaaaatgttttatgagtgaatgaataaagcgaatccagttggcaatgctggactatatacagcttgacttggtgatggttaccttacagactcctcccctgcaatgttctgaaagagggcagaatgtcaacgggcaggcacactggccagagagaaactgagcaatgtgagaatggccaggggagactgggcattacagcaaaaaagactggcattgaagctcaccaactgggttgtcttgagcacatccatttcctcttgggcttcagtctggccatctgtgtgtctaaacaaaggcaggaactactagaaagatggggtatcatttcagcaagaacaggtggagaggtgaaacatgactcatctttctccacctgccccaggggactcccc[450 bp omitted]ctctgagtaaacaatccaatgatgctacccacaaaggccgcagatccaagcttaggaggcatcttcccgtcaatgccctgggggcccctgttgccaagtgacatgtgtctgtgattgcagaaggccctattctcccagaatctaggggaggaagggggactttatgcagctggaaaaggcaaattctaacagtcctttgtgattttagacatggtatttaatctcttttgaaatgccaaataatattaaaagagggcatgctgcttttatgatttttcaggaagggtcatggactaataacaggttgcaaacattgcaacattgctgggagggttcttgcccttgctgtaggtacatattgctgttctatttataaccaacatgaaaacaatgtaataatcagaactaagagatgtatacatccctttagcctacctatttttcttggatctggaatattttgggcctcacttgttgatttttagcagcagttgaaaggagctgaccaaatgcacattaacgagacgacattcctgtctctttctgtcttcactgggagacgtcctatttgagccatcctggtttgagatcccagcctcccacccctcaagcatgagacagccacgagaaggccccctgcagccacaaacatttgtcagagtgatttggtgaagttcagcagtgaaagcaatttcttactcggaaaatcatttatcatggatagcctgtcgaaaacaatctcatttcaaacccttcccagggagaaaagaactgacaactggcactaagtaatctacaacagagccatgggagtcattcatctttcctttgcccagcccaggacttgatgctttcagaagagaagtggaatcaatcataactgctctgaggggcttcaggtaaaagaggagggggctaccgggacagccacatactcctgagtgcacaatgggagattgttcagtctctattttactaatagccaaaaaccagaagagtagttgtaggggtctttgagggaggtgtgcctccttcattacaaaacatgttctttttgtacttttagctcatcttaaatgccagaatcctccttcttagggagcaattaaggaaaagcttattgcttttttatataagctgacttcccctttgcctggggcagtcttttctttgccagaccatagcatggagcttgtggcatagtagataatgattctgtgcatgccatttccactgacatcaacaccctggaaacagaatatctagcaatttgaggctcatggagaaaagcagaagagggaaaatttttccccattaagttccctgcttttttaaaaatacaattagttacagataggaaaagcaattgatcactttccttactgaatgtctgattaaacccaggttctggttttgaggttcaccaagccccagaagaagctaatgaatttcagggctccatcattctcatgttttggcattaaccagtgactcagaaggtactgccagatgcaaattatgacatcaatgctatactccctgggaaccaaataaaacagaaccacctttgtagatgggtagctcccaccagttcccagaaatatttatattatggatattagtacttcattagtacttcattattataccaatcttaactcagaaataaatcaccaggtttagcacatatgatgctttaagataaaactgtcctcaaactgctttcatttctctgtcattatcaggggtctgaaatcctgactattttggaaagaagtgttatgctattttgcccaagccaaatgcaggcattaacggtaaagttctgggataaaatgctccatttgaactgaattgttcacataaaatggctaatttctattagccatttgggagtacttctgccacttcccagctgtcactttaagcaagatactttagcctctctgtgccttggtcttctcatctgtaagaagggggtaatactgctacctaccctgtaagatgttatgaggattaaatgaggtgatacttacaagggccacagcgcctgccaaaaagcaagcatttaatttaatttttttttttttttttgagacggagttttgttcttgtcgcccagactggagtgcagtggcgcaatcttggctcactggaacctccacctccagggttcaagtgattctcctgcttcagcctcctgagtagctgggattacaggcacgtgccaccacgcctggctaatttttatatttttcgtagagacggggtttcaccatgttggccaggctggtttcgaactcctgacctcaggtgatccacttgcctcggcctcccaaagtgctgggattacaggcgtgagccaccacacccggcctaatttaaaatatcttttagaaaactctcagccagagatgaattagggggtaagccaaccactcggtttcctggtagccaatctataaagtccccaggagatcactggaaaagtaacaagatggaaaaatgagattttcagggtgagcactcactatacatgatcgagaagagcactataaaaagccaggtgtgaggaggtaaagctcccataaggacaagatcagagataaacaaagagtctctgaactgctaaagaggcttgccagggtccctgagccacctctacaacagttttcttcctcctccgcttccccaacacaaaggttagtttctctgctaaataaatattgaatacttacataacaaatatcaatttgaaggcacataaaattatgagcctgcccaagtgtcttcttggcctaccatgctctgagctaactggggcactgagtgtaaacactctcccggctactgctttgctctttccctccctcattattcaccacattcagtgaacagaaattccagcttgagccacctgtagtcatgtggcattggtccaaagccctcactaccatgggcgccaaccctaaggggaggtatcctcagcactcactacgtgaaaacctactttgcttgggaccaagaaaagaataattcagcatgaatacgacatcactggaacttgttagtgttatttgaaagatgtggctgaagttttacatagggaatgtgtgcttccatcacaagtaacacagtgtatacaaaactaacaaagcagtttgtggccaagaggtttttgttttctaggatgaataagaagtccatgttcttgaaggaacttgaggaacaatgactacttcaagtccaccctgaaatatggacacgatggaaaagcaaaggtgggtcatccacctgggaatctctagttcaatggttagctcagtaaatcttcccaatttaccatgcagatccatctcccttaaccccataaactgggctaaagaataaacatattgcaatttgggtattaatttaatcaggcatgattttgcagagaagcccatggcaaaaaaaaaaaaaaaaaaaactttctataatgaggtccaataccaaaaatagtagtaacaataatttaaaagcagattgtttaaaatccatctcttcctctctgtttctatccataattgaggaggaagagcatttgttcagcctactgtctgccaggcatgtgccaggagcttcactcatctcttcaccccagtatattattgctgttgtatggatggagaaaccaagatttgcagagattatcacctgcccaaggctaccttcctgggaagagggagatctggatttgaaccccacctcggtctgagtccaaagcctgtgctcttcccacattgtgctgctggccatccctgaagctgccgctgtaggtggagcatactccctgagacgaaccaagggagtagtggctatatatatatatatatgtacacacacacaaagcaaacaaacaaaaacaaaataagttggcgaggatgtggacaaattgcaacccccgcatgttgttggtggaaatgtaaaatggtacagccattgtggaaaatagtttagtgattcatcaaaaagctaaacattgaattcctaaatgaccctgcaattccactcctatgcatataagaattgaaaacaggaattcaaacagatacttgtgcacaactgtttattggagcattattcacaatagccaaaaggtagaaacaatctacatgttcattgacaaatgaatggataaacaaaatgtgtggcagacataaaatggaatattattcagccatcaaagggaattaagtactgatacgtgctacaacgtggatgaaccttgaaagcattatgtcaatgaaggaagccagacacaaaggtcgcaaatatatgattccatttagatgaaacatctagaagaggtaaatccatagagacagaaagcagatcagtggttgtcagggcctaggaggacagaggaatggggagtgactctgatgagtatggggtttccttttgggtttacagaaatgtcttgactaaatagaagtgatggttgcataacattgtgaaggtacgaatcaccactgtatcgtacacattaaaatggctaatagttacttttatgctctgtgaattttgccaggattaagaaaacaaaagagtggtaaagttagaagatatttcacaagttctctattgcactgcattctttgtggatgaggaaaatgagctgtcagtctgtccagtgcggaattacatagctaaagtttgccggtgaagttggggttagaagtcaaccctctgtcaattaatttatcagagcttgcacccaggctcacactggggctctggaggaaaagaagaacaatattgagagaaataattctttctcaagtgtaactgagagcctcccagttcctgcctctttggctcaaagctcatattcctgggaagtcatcctcccttccactccagggaaaatggcttcctacttttatgtgaaaaggagccacaaagaattcagcatcatgaaacacccttagctctatcaatagagaaatttctgtcttcaagggaagtccacttgatttgcttctgcttgaagtgaagcagataacctcaatcaacatctgattacttctttaatttccagagcttgctcattaccgaagccacactgtctctagagaaggacctagagtaactcagattttaacacacctgggctgacaagttacttagcttgggctttaattgagaaatcagttattttacccattattttgctaacattatcaaaatcctgtgatactcaaggccctgaaatgacattttcctctcctttatcatttgtacatgtgactaggagaaaattatgtgtgatggacatgtcgaagatacataagttcttgaagagattctttcctacttgctctactcactgatccgtttccactgaacaaattgagtatcagcatgagaagtcacaaggcagggggttcattctttcttccctggcttggctttctaaagcgtgtgagttttatattgttgcttttcaagatgtgaagttgtgtgtaaatttgtgtgcatgtatgatgaatatttttccctgctaaaaggtacaatgaaattgatagtgaaactttgcaaaccaactctccgataagcttctagtgtttttcttttttttaggtttgccactaatcctcccagcatttctgcagattgtaactgaagctcagcttttctaggaggaaaatacctgttatggtcaacaacctaagagtcactcttgattcctctccattttcaactaaacagctgctctgtctgtgacgcctccagcatgtgctcacaccccaatggcctcggacctctcccaaggcagcatcctctcagttgagacctaagaaaactgcctcccaaatattttccttgcttttgtctttccctgaactctattctccacatcacagtcattatttgctaatggctttattgagttctagtttctacaccatacaattcacccatttgaggtttaaaattcaatgggacaatcaattttaaaacactttcatcacctcaaaaagaagccctgtagccttcagctatcaacccccaatctccccacaagcaaggagtcagtaatctattctctgactctatatatttgcctattcttgacattttacacaagtgaagtcatatactgtgtgatcttttgtgactagtttcttccacttagcataatgctttcaaggtacacatatgttgtggcatgtttcagttctccattcctttttatagccaaatggtattccactgcataagcacatcacattttgttaatccagtcatctgttgatgggcatttagattgtttcgctgttatgaatgttcaagcgcaagttttgtgtggacatgtattttcatttctgttgggtaaatacctaggagtggaatgtacatgtcatggtagctctgtctttcagtttttcaggaattgccaggctgttttccaaagctacagcaccattctacatcatccccacgagcagccacaagggttgcaatttatccatatccttgtcaacacttgttatgatctgtcttttcaagtatagccatccaaatgggtgtaaagtggtatctcaccatggttttgatttgcatttctctgatgactaaggtgttgaacatcttttcatgtgcttcttgactatttgtatatcttctttagagagagatgtattcataaactgaccatttttaaactgggctgtcatttcactttctttgtaatgtccttccattgaaacacaaatgtttttaattttgatgaggtccaatttatctactttttcttttgttgcttttgtgtttggtatcatatttaagaattcatggctaaatccaatgtcacaaaggtctaccccgtcttctctcctaaaagtttaaatgtttttgctctcacatgtagatctttgatctattttgagttaattgatgtgaagagtccaattttattattttgcatgtgcctatctagttatcccagcaccattttttttttttttttttgagacagggtctcactctgtcacccagactggagtgcagtggcacaatcacaactcactgcagcctccacctctcaggctcaagtgatcctctcatctcagcctctcaagtagctgggttcacaagcgtgtgccaccatacctggctaatgtttaaaaaagaaatttgtagagacagagtctcactatgttgcccacactggacagcatcattaattggaaaaactattctttcctcattaaatggtcttggtattattctcaaaaattagttgactataaaaactggatgtatttctggactctcaattctattccactgatctatatgtccagaatgactgtttaaaagtggaaattgcattattactctttctaaagtaatagcctaatgcccaatacaagtcattctctatcccaaggattcttcacttggggccatatacttccaagaggtccttgtgcagtactcagggagtccatgatttggaccaaaaaaattacatctttatttttattaacctctaattcaaatttggcatttcctttaattatgaatatagcaataaactgtagggagccaaaggcccatgggacatgaccaactcagcattccactggaggctatatgatcaaacagcaaactgtttatcgtgaatgcagaatgtgagcaaactcaggactgcgcatgcctccaggaggtttgctaagggccaggaggtttgctgggctccttaaagttatctactgggaaatctagtgcctattgtttgaagaatgcagtcttgcaagcctgctgtgattcaaactgctggccgacaaccacctgcccctttctcgttatctcttttacctaataaattcggaggaccgaaacagctcagggcccttgtccactagaggcgaggtgcccccaaccccttcttccaaatatactctcttgtctttgacttttattccccagttagccccactttgttcagtccaccagggatcatggcaggttacaagtggcaccccgaacagtgacagaatcaggtgttctacaataaattagaacagtattaatgacacttgtaactttttttagcaacagaaatctcagatatttacatataagattacaattgttacaggtatctcaaagtattacttatattaatcctactttaaaatgatggtggtatattagaattattgctggatcttcataaaaatgccctaatcaagaagcaagcagactttatcataatttgttttttataatctgataactgattttaacataatctattttcttataatccaatgtttttatattatgcctttataaataatatttttctgagaaaggggtcatagtcttcaccagactgccaaagaagtcctcagcacaaaacatttaagaaaccctgctttttccattaccagttttattttcttcccagcacatggcatcaactgaatttatcttatttacttgtcaacttgtttacggtctgtctctttctgatactggaatgtaagtgcttagggcttaaaatagtgtcaggcacataatagccattcaataaatatttattgagttaattacggaatcagcagcaattttctaaacaagagctaaatcattggcttaatgaaaataaagactactgataccaaattagtgacatgtaatccatactgaaaattattttacatttatgccatcatcatcattagatttaataaatgccagcatgtcctatgtgctgtattaagtgcttgatgcacagtatctcattcactattctccatactaacaaccaagaatatcattaaccatacttacagttaagggaactaagcctcagagaggttaatttctcactcaagttcacatagctaacaaatgacagagttgggatttgcaaccaagcctacctgccttcagagtattgatttttaactacaataaaacacttctaagagaggaggaattttcttcctgttcaactgagaaagctaagatcctgtgaagttaagaaatgtggcccagaacgcagagttcagcagagatttccaataaaatgttctttccactgttctccttatgagccacagcaggaaaaccccttagcagaactgggtgctatcaggttgcctcctacgagaagatgaattttggaagaagcataattaatactagcaggcattaactgaagcctgttcttttctttcctggggtccagtctgcttctctaaatattagggcttggcctcattcagggcattaaggacttcattaggctgaaatccaagttaatttgattgcacaattataaactgtccctggctggaggttgtctcatttgccaggttgcaagggggcagcatggctggatgacatgcttttgatccccagcttgaagtttcagtgctttctggctttgacctcatcaagttttacagaaaggaagttaaattggagcagggagacagatattctccttactaaagttgtcacgggcacacagaggaccattcatcaggtctgcaaagaaacaaggcacaggaaaagtcctggtcacccggaggtggcagcaaatgagatctaaccaaaggtccattatgcccaaggtcactcacccacatggcaagcatacatccaggctgacccctttcctctttcctgtgcctcattttccccttactggctaacaggttattcagcccgggtatgcagaggagccaagggaaggaataaatcgcttcgttttcaacagggattttgttgacattagtagaatctggaagcatccacttcatggagtagcattttcctctcctctgctattcatgcaagtgatcaaaggacccacttccagccttcctcaagagaggcctctcctccagccaacaaagtcccttcactgactatttttgtaaagacattaactttgcccaaagagaggcctggccttgtcctgagcttctgggaggcaatgtctaagcccttggagtgtcatgcctgataaaagtgtcttttccaggggtcttgggctggccagatagtaacagtgttattttgggtaggggctgaccatgccagaaagtctaacaatgtcatttatgatggaggctttgggttacatggtatccatccacctccaggggagcaggggactgaggctggccatgagggcagtcattcaagtttacatgatccagtcccagtaaaaactttgaactccgaggcccgggcgaactttctcgattgacagtactccttgcgtgtagtcacacattgatgctgggaggtaacacgatccatgactccacatggaggagataatgaaagcaccatatttggatctttcccagactctggcctatgtactttgtcctttggttgattttaatctgtatcttttccctgtaataaattgtaaccgtgagtataatagccttcagtgagctctgcagtcctatgcattatcgaacctgaaggtgacttggggaacgtgccaaacctgcagttgatgtcagagggaggatggtcttggggactgctcaccccatgcccctcttctgcagcatccaaattctacccatgccttgggacccaactctagcctgccatccttccttaaagttccctggattactgcaaccagcaagtatgctggcttctacactaaaagctagtgtttcttaaacgctttttagcaaattccacagtaagaaacagagtttacgtcacaaatcagtacatttatacagtatacatacgtttatacagtatatatacatttatacagtacatagatctatatatgtaatggaaacaaaagtttcataaaatcaaattgaacttctctagctatatttccatcttgggctgatcaatctcatgttttatttatttatgtatgtacttttagagacaaggtcccactctgtttcccaggctgatctcaaactcttggcctcaagccatactcttgactcagcctcctgagtagctgggattataggtaaaagccaccatgcccagctgtgtcatcttttttaaatgcttgtttttcctttcacaaaccatgaatgagttgagattgcagttttcagaagcacaggtctcgtccattattctgataaccgatctctttactgccttacaatacatcttattttgtttcttaacttcactgtgtttatatctcatctctctcaagacctgattaaaagtttcaaaacagacctcaaaaagaacaataccaataatatctaatactttttttggtcatgttcaagctgggcactgtactaagagcctttccatgcagtgtctaattgtttccacacactactatcaggtaggtattatccactatgacatctctcatcaccactttcaccccatgtgacaaaggaaagacttcatagcttggaaaggttaactggcttgcccaggacagctacaaagtagtagagccaagtaagccaagaaggtctggtctgattccaaaccctggtgttcaccactaggctccttcctccccactttctttttgcaaaattgtttttttaaagacagggtctcactctgtccctcaggctggaacacagtggtgcaaccagggctcacttctgcctcaaactcctgtgctgaagccatgctcccacctcaggctcttgagtagctgagactataggcacataccaccatgaccagctaatctttaaaacattttccagggcctcactacattgcccaggctggtcttgaactcctgggctcaagtgatcctcttacctcatgtgagccaccctgcccagctacattcccacccattttcattccccgccagagctgcccagcagacctttttgccccagagtggaaagggcacagatgacaaatatgaatatacaattctggcccagtgggctcaaagaggagggagttggcaatgtttcctcttcagccagcattcttttcaagcaaagctctgtgaccttctacccgaaggcagcgctctcaggcctgtctgttgcggttcccctcactcatctcaggagagtctccttccagaatgccaggcacccctgcctgcctccccactgcctcgccttccctgcaccaattaaactgtcacagtcggctggcttggaggcaggtgaggtcaggaagaaatctgaaggaagctgggaattcagatgagatgaggcctccttgtgctgaagctcctcttctgttttctgtcaaactggtctgaagactgattggatgagcccatagagatccctggcgactctctacactcacctcttcctctccaatggagggtgagaaatacggccttgtacagaagtggcagcttttgcatctgtttgggtacccagtggtccctagttcctggtgcaacagcagtgggtctcgggtggaatgattttggctggagattgtttgcatcctggaatcattgcctaaagaggaatttgtcctctacaaacaagtgctaacccacaatacacaagagaagcaaatcaaagagctcttaggcttggcctaatagatgcatcttgtcttacctaccccttttagtgttgtctgttattggaggaagaggtaggaagcccagggcctccctcccagagtttccttagcatcacctgtcattgttgagattttgaatgcattgcaggttaagggacacttgatcaagaagggaaaacacagcagagactttcacttagacatgttttgtatgtcatgcagggaaaagttcccagtcaacctctgcttaaccttcgggtttgaagatggccctctggcagtcacctgatcttcatggcagaagaaacaggagtgaatgagcagatgaatccatcttaagagaatagaaatccttagtttgggtttcattgaccaactatagggtacctggcaggcaaaatttttgcagctttcatccaattcccaaatgggtgtttgacccacaaaagaaccaccaccagtctacatggtaatatacatacattgccttctataattttacttgctgtagctgccaaatcttattcatacttcctccaagcataagcacatgcatgcacacagacacagccgccaaatgcaccctccttgtctactcctcagcctcacctcgtacctgataacagattgtactcaaaggcactggaagaccacatggctgcctggagcacctttcaattattaatgctgttctttaaaggccttgccttattatttctactcatgctattatgaagagggcaaactccttaatgcactcctgtgccacttcctcccactgctagaggaaaagcacatgctaggtacagtcatctaatagcatccacgttattttcaccttctctgcacactgtccctgcagttctctctggggcctcaagatcaattgtatctcaaactgggccatgggttcattttctgcattttctggcatggagtgagggtagcgggtgtatggaaattccagctctcaaattacaaggtggcaggtctctgcatgggtgtgatgagcaacatgagataggtatccttgttaaggacaactgcattctagtagattccaccatcagaggtcctggagccctacctactatttcttcctgagagtgtcctgataggtaaaaggtggtgtgagtgtcttccacggggaaaagagactgatgaggcagctctactgaaatggcagttgatattaatagggccatctacttcctactttgaaaatatctgagctataagctcagacgctacctatcactaactgccaaatttccatgaaaaagggtcagtgatgaagttgtagcctagacttgggaccatgtctcaggggaaaagtctaagtatgcctccgattttgttttggaagggacgacaccgtaagaatttcatcagtaaatattaaatacaaagttcagcaaattgtgaactttagggttcatgaaaactaaagccaggatttatccatgtcaacctgtaccttatacctacatatgctagaaactaaatcaagtttcatacaatgtgcccatttagctaagtaagtcagaggatagtttccaataattactaacacttacacacttagtataatcaactcttctttggtcaagttaatatcctggcagaacagacagatttgggcctctcttcttataaaaaaagaatctgacaatttaaggggcatatgttcacttccatttatgtcctggaaaatatgccctgtgacttagcaaccatgttttaaaagctcttgcagttcttaaacaaacagagtgtatgtttatgagcttctaacaacgttattttcagagatgatgtagagttagtgatatgtagctctggggcttacagtaagctgtagatgatttattggtgtggcatacagtatttgcctcgagaaaaatggaaatttaagcagtgtttgaaaatgtgttagatggcaaacgacccggggcaccctgagaccaaaggcttcccatcttagagagagaaggggtcctttttggcagatggaggagcaagggttaagaacgtttcctggcactcagggagcacagccaattcaagaccagaaagagagacagtttagaatagaggctgaaaacaggaggcccaaatctggcctgcagaggtgttttgcttggcctgcaagtactttaagagttttggatttgaggccaatattttaaaattggagattcaacataaaatgcagtattctgtctcctctttgaaacacaggaagatctggccactagagcctgcatttctgcataggaacaatcagctggacctgggaagccacttcaggtgaggcttcagctctcattgcagtcctcaccagatccgcctcactcatttccaatgtctgcccttccctgtccagatgaatttgcaaacatcagatgaaaaaaatgttattttgtactgttgcactctcagcgaacagatctcttaaaccagtaagactcattgtcagataaaagaatggaaaaggcacatgtttttccaaaactcgggagaaaagcaagactattaagttgtcttaaaatttttgttgtatccattgttttgaatgctgggttgctgaagttcctatttcccaaagccaagttatcagacagggcttaaaataaaatgcttattttaattttctcatttgaaacaattagaccacattgaaggggtttagtataaggcatctgtctctgagcatgttttcttatctgtgaaaatttccagaaggatggggctgttggaaagggagaaataaagtcaatttctccagcaggcagtgcaggcacagtgcctgaggccactgtacttatgggacacaaaaaagtctaaattttaacttctttaaaatcagaagaaaataaatataataataaatgacgaataataacaacgaatccaggctgggcacagtggctcacgcctgcaatgccaacactttgggaagctgaggtgggaggactgctagagcacaggagcttaaaaccagtctgggcaacacagtgagacccccccatctctacaataattttttttaattagctgggcatgatggtgcccagctgtagtcccagctactcggaaagctaaggcaggaagattacttgagccctggaggcagaggttgttgtgagccatgattgcaccactgcactccagtctgggaaacagagtgagaccctgtctcaaagaaaaaaaaaaaatttgccagccatggtggtgcattcctgtaatcccaactactcaggagactgagactgaaggatcacttgagccaaagaggtcaaggttacagtgagctatgatcatgtcagtacacttcagcctgggtgacagagtgagaccgtgtctctaaaaataatagtaataataacaacaataataaatccagcctggattatattcattcttataccaatgcagccgcaaaatataatatttaatattcttatggaagaattggctcaacaaagccaacgtacctagagtccatggaaatcacagcacggagctggaggcaaatgctggtcttcaggccaacaaccatgcccacactgtggcctgtttgcgagcagcacaagctcattttactgcagactctcctccccatcatgcccctgtgatgctctgtatgtggcaagttcgtaacaagacccctgcaaagcacgtcgcacactgacctcagtttcaaaaagatggagtggatgccattcagatgcttctggaaatttccaaataaaaatttccaaaagttttaatcatctatcattggacaacaggtattactgccactggatagagtccgcttctctgattattttatgccgtccctgaagcattctcaatccctaatctcagtagctgatttcaaggcaaggttttgcttgactttagcgtatactgaaaatcacaaagcccgagtacaggccataatgagagtcttctcttgtggactcctagagttgagggcagactgagttttctgtctattcaactcaaaatctcccctacagccaaaacatgttatagcatccagctatcttttcaactcctcaaccttcagcacttactgtgtgcaatgctcatattagtcattgatatattgcttagcgatgccttacttgttcttgttttgttatcttatttttcctttatatatggctggacttcctgccccttgtaaaaatatgtataatttaaatgtcttaatggaaaagatctagcattatacataagtactcaaaattccccagtacctagcaaaatgccttatacacagtttgtactcagtggagagctattatctgattggtacctttaaggccacaggtacacagacagctctcagcctcatctctgctactgtgatgagcctggtggccaattcccccatgctcttcttctccacttaatttttaggcaggacataattgtttcctacacacacacacacacacacacacacacacacacacacacagagtctttctctccctctctctcttttctcccaaattctatgaacaaagacatatgcatcaaaaagtcccaagggcattgttgctttgagagttctatttttaagccacaaatgactcatcaccaaccagggtctccccaaagctacatgtgtcaggctgtcaggtcaaaagacaaggggtaaaagacaaggaagagttcacatctcctccagcccatgaaccccatgataaagctgtaaaagctgccaccactccacacaccacaccacacccctaccacagttgtgttaggcacaagcactgcccttgtgtttggattaaactgttctgagctataacatttcgctccagctggctcctatcctgatctctcagcagtctctgaatgcatgtcagcctgtgactatagggaaaggcccagtgccatgtgacagggaggagatgcagccctcttgcggtataaactcaggcttgttgtagaggacagaagtaactagtgggctagtgggtctgaaagggaatgcatttcttcatttgccctgaaacaattattcttttaaaaagaataagagagggctgagagagtgccaggttgtccaaagcattctttttaagttttggagagtggcgagaagggaagaaataattcatcctaattttggaaggcaaagtagatagggatgtatagacatagttatcagatagtgtttccacaggggaaacaagtgagcaattgggcaaaatgtcctcaaaagttatgcataacaaattccaaacaggccaaaacaatgtgttcagctcttcaatgcgttcagccctgtgttacccttccacagtggagctgaactcttaactcttacccatccccaactccatgctgaaacagtacaaaaaagagagggagacagtggggagggagagagagagattagtaggagggtcataaaatcaaggaattcaaggcctctcaccagtgaggatgaaataaactaatcccacgcagccacctggctggatttgatcttttccacctgggattatctttgttctttcccatggccctaaagtttcccccatgataagggcctagaagtccagaattggcataaaaagacaatatatactttgctattcaatgagtaggttatcatgtctttgttcatttctgtatttagtagaaagaacccaggagatcaagtagaaaaggactgggagagaaaagttctatcttccagctccagctctgcccctggctggtcggatgaccttgaggaggtccctcatcctcattcctcaggaaaggatgctgaggctcagagaacagtggcaccagttgggatccaatgcctctttgactctaatactatattctacagttgtcttttgtggcagacctgaaaggttcagctcagtcctcctgtcctttcctagcatagtccctgatttccccaatgaaagccaaagataagcagttcccttaatgcttctagatgccattgcctacgatgcctaggtaccacttgtgcaatgacaaataagcaaggaagacaagatttcctcaccaatgtggaagggagaaggaggaagggtgctaatgctctgaactttgacgtaaatgaaaccaatctgtttgacaaccaaagaacagatcctgtccccaaaatctacctatatggagacaaggacatataaagaagttgactctgttccttggcatactctccacctgtcttctctaccaggctttcactcgattcctgaacaaatggcaatatggaaggtcagatgagctaggaaggctgagttagagttactctcatatcagagcaccaagtgttgctattaaagggtacattctgaagggagacaagacttcccattggagttatttacagcctctttgccctgaaggcatcttctcttccaccatccctgagtgggctcggctcctctaccatctgacattccattctttcaacagctgctggctctcctgttgtgttcccttcacagatgtgcagtgccgttctgaacatcctgcccttgaactttccctacccataattttccaaaccaaagcctggcaataaaaatgtcagtgagggatggagaaaactggggggagtattttaaaaggaaaaaaaaaaacagggaggtgctttgcacacagtgatttgtgttgacttcttcaacaaaggttaaatgcatgccgtgacttctcaaaaaagggcatgaaggcagacagctggagctaattttccagaacactacctagaaaggctgtatttcataaaggaactggttacagagtaggctggtgagcttccttttccatgtcacaggctgcccatctcatcatgctgcaggatggggtacactaaaggggatagtgaaagctggtatacacagtcctttacagtttaaaatgcgctgtcatgaatgggatgggatctgtgctgtcctcacagctctcccaggtgcctgtcttggggctgagcacaggagaggcagtgggtctacacctgtgcctagtcagtttgaacaaggctggagaaggaagccagatactttatgacatttcaaagacctccatcctatgtggctccattctttggggccaaattttcctgaagtccattagtttgataataccaactctctgggcatataaacattgcataacataatgcaaaactataacaaatcaactaattctgtaactctctaaaagagataaaagaatgtatctcatggggaaacagcatttctcatatctatttcagtatgccaaatcacaaggacagattaggtaaggataggaaggccaaagagtctttctacttggaaagacacccctaggtggtggaagctaatgaggaacaatcagctctccttgttttttgttcatttgatcctatctcattgcaaaatgctgccactccactgagataacagagaagctggtctcatcaagccattattaggaagaactgaatcaaggcccaaacagacatcagacagcacctgacccagggcagtgtcttacatggaaggcctgtgataggagcctcctacgtacccacaactgcacacttggttctcagggtgagaaatggagaaagggagaacaaaagagaaaacaagaccagtgcattggcaggatgaggtgatgcaacttcccattcttgcaacatctcattaaaccccatcagttacttacacaatctggaaatttacttcttgacacttagaagagagatggctttagaatgagccatgctggaatctaatcctggctctactgcttactagctacatagcttgggctatgcctgcagcttcagcctcctcatctgtaagtgggaatagtaatacctatcctaagaagttgttaggggaattcaatgaggttgcatgtgctatttttggtaaagtgcctagctctgtagctcacagacagtacataatcagtgaatgttagttccctccaacgacttgccctctcttcccttttgaaacagaatttctaggccaagggatgagagaccaggctatgtgaagacaggggagggagaaactactgggcaactaaaccagttctgctaaagctctggacatccccaatacatcaatggtgccagttttattttcagagactatgaaaacaatctggtcaatttctatcgcaatcttaaagatagttttccttaaccataagcaattttactgcctggaaaatattcagcattatcacatttgaagatgttacaaactaataaatgaatacaaaatgaataaatgggtgagtggatgcaaaagtaacattttaaaagactggggagaggccattttccaatcgtaaccccactgttgccttggcaattgtgcccttggatgagatgctctacaaaatttgtgctgccatttcctgctccttcctaacgtccatatccccaaaacagcagtgctgataccagaagccaagagcaaagactggcaaaatcagcaagtgcccccattgtgtgccagccattttggagcagataaagtcattaaggaaacatttaacaacgtataacctttcagctttactctgcaaacagcaggtagcttccctttcagagacaagagcctgcattgaagtcaccagtgagcaggacttgaccttcattttcagtatacgccacattaaatattcataatccgcgtaaccgtagcataagaagtagcagcgtttaaacatgaatcaaaggaataaatatcttcacacatgtgagtcatcctttcccagaatgcccctggtgaaaatgcaaatacccagagctctgggcctctgtctcttccaactttctcttgaaattctgaaagctacagggactgctgcattatgcaatccatgaatctcgctctcatgctgacactggtgggtctttgttttttttccttatctgttagataagaattgctgttcttgtgtcaaagggaggaaatagacaaggatggaagcagcaatggtgacattagcacccacagggcgtctgcaggcactcttgacttggttgtacaatttctaaaaaatctttgcttcacaaggatcagaatatgtgggaggacagggttggcgttggtgtcgggagacatcagaattaggaactaaagtgacgtgtgacataaattgggcaggagtccttttaaaaagaatgcaaaagaaagggagctttttgtacacaatccacctcgtgtggctaattggagatctttggggagatggtgtgtggagggctcaatgcttgtctgtgcttgttaaggcactaacatgatgtctgaccaaagactcagtccagaggcatcttcctctgcttgggtgtttctagagagtctactgctgggatgataaagcataattttagtaaggtttaacgtaattatctttggttttcaattccaggagctctgaggacaatctgtcttagccagatagtaatcacttgcagctacacaaatgagtcttccctcacaaccaccctaggttcattaagatcagacccaaagaaaacgccctatgctgggatctgtctttgcctaatggccaaaaatgaaaggtgtgcagctgtctttggaagtgacttatccatcacctctggatagtaaaaagagctttaaaaggttaaaaagatcataaaccaccaatgatgacctttctctgagctgtattgctaatggacagaagtaaaataactacctagcctgcttgtccacttgcacaactggagctggcctgcctcgagacatagctggtccagcagacctagggagcctgttttatacattaatcggcattccttgcacttttcaaagggctgggtgcagagagcctggaatctcaaacttgtgctacaggatagtcctcagcattctggaggggaggggcagctctggctaaaattcactgagacaagccatttcacgcatgtctgttggtttagattcacttgtgggaaagcctatagactgtcccctgattcatttatttgaagggtgtaaatactagctacaattcatctggagaattctgggtgctttttttccagggtgatgatttagtataacttccacgagaagtttaaagctgtctttccaaaatacccagatggccagccaaaccatgaatgtgtaaaactggtaacagttttgaatgaaagacatggattttaagaatgtacattctactttctcactttctttccatttgcatcttatatgtggatagaacttcatttttttttctcattcactaagctcgattataattttttaataggtttcactgtgttttattcctggaaatctatggacttaccatagagatggctttagagattctacactaattctctcccaaactaaaactgagcttgcttgccgtctttcccaaggaagatggaaaactcccttgtgctgaatccactgattgggcctgccaccggacagaatcttcggatatgctctcagaacaaaatgaagtcatgaaaatgaaaagtttctatataaataaccagaaggtcttcttataaacaaagccttgctatgccaaatcacacagtttagcaacagagaagaaaggctaaagctgggatgaggctacgacagtcctcaggcagaatgggaatagccttgtttctaaccttatgggcatttttgccaggaaaaggtgaggacaggactgaagttccatccttgggatagactatttgcaagttcataaaagaaaccagaatcagagaggactcccagtgccatcttcgccaaggcctagaaggatcacaattaaagccaaaggacattgagatggtgtaggacattaggggaagagggtgcattggggaatttcattccttttcatcttctcacacggaaacagagaacaccaggatctacagaacaaaagactgcctcatagtagactgtaaaaaaagacacaatccaaatccatctaaagagcattttatttctgagaaatacagagggacaaaaggttaaaaaaataaaaaaaataaaaaaacgaaaagggaaggaaggtgctggctgaggcatctggacttctaacccatcaacacactcacctccacattagggttttctttctctgggacatacaagcttcaagcccaaacctctttcctgagtctcagcatggaagttggcagggtctgcaccccacgacatgtaagaacacccctggagagagattggagaaataagaccaggggctttagaggatcttcagttcaatacaaataggatccagaatcattaacagtaaatatttaaaagggggcttaccttcaatgacatgccaatgggagtcttccaaacttaaacaagctcttctctttcttggctcgggagagctgatggagggagcatgtggaatcttgtctcctgacagcgtttaaaggactctccatctgagatgggtgagggcagcccagcctcgcatgtggggtgggctgaaggacctctgataggcttaaacttggctgattcccagagacaggttattaaaggagatatttgctttgttttccctgactgacattttggcctctccacccaaatgcacaaaatccttggccggtgaccagatggctctgagaaattctgagtttagctgtgcatgaaattaccaccatcccaagccacaggaaaggagcactaagctcagaattcaggcacaccagagtctgagccaacaggcacaccaagcaggtttcctagtatcaaagtctagtagccaaccatgccagggatagagtttaaagttcaaaacactcacacagtggacaataaaggcaacaagctcaaggccattgtcaccagagttgccaagttcacgccacaacagaaaatgagttagactccagcttgtttcccagatgccatcaacttcatgatttgcaatagtatagttggaacaaattatttcctcagggttggcacctgcaggaatcagggcagaactggctgcaacattgcagttctagtctgtgccctcttcatccttctgcaaggtctttatcatctgtcacccaggctcactctggagcaccagtccattcggctggcacccaaggagtctgcatgagtgtccactctagaagtcctcaaatggccagggcctccacctctgggggtcatgatgaactcctccatccatctccttaccttcacaagtcaagaagcaccagcgtgcaatgcttcagctgaatacccgattggcaggtgaaaggatagcatcatgctttctaatctgacctccagtaagatcaaagcattggaaacccaattgagaaaaggatcctacaaccatagcaagaatggctcagaccctcatctgtgggaaactgtcaccctcccagaagttgcaaattcccatcaagtcatcttaactacttgacatcttcagtgcaaatacatcattaggaaacagctctttaaaaataagtaatacccagcaagaagacttgacctcatatacctcaccctcctatgccagcagactcaaaatagccttccttctgagaactttctttcccatttagaaaatcagtacagtacagcactagcttcctccaaaatcttctgcactcagaaggtcttgcaaaggttggtgtcaaggtaaataaatggatcaatgtaaaggctcatgattgtttatgaaacgagggcaagaaagtatatttgaatactcactttgatgaatctatgaagtatattacaagtgcaccgatgctgagagcaaagactaagacaacctgtaaaagaagaggagaatgccatcacttaagagttggacctcaggatgtttgggttttttgacacataccgaagcagctttgaaatacggtgcccattgcccttggggacctgcttggaaatctcaccctcatccccagccccccattactgcttcaggtttggctcttcatacagcaatgggcagcaacctcgctccttgccaataggggtcagggtagccttttatgtctcagggcactgggtttttatctgaccctgttatctcgaagtccagcttctctgcaattgtagttgataaacttcagtgggaaaaaagcaggtgaaaatttagggtgatacaatttttaatattatatgtagtctaggatctgcaggaactccaatagaggaatatcaactttaacagcttcattgaggcataatttacataccacaatattcacccatttaaaaagtacaattcatcaatgactttagtaaatctactaagttatgcaatcatcactgtaatccagtttcagaacattttcatcatcccagtaagatccctcatgcctgttaaatcaatcccctttcccatttccaagccccagaccacactaatctactttctgtcactacataagagataccaatttgaagatcacaaatttgctcgtacaaatgtccgtgtgtgtatgtgtggacatacataaagatatattcactgcatgtatgatctatatgattagaacacttctgaaatatttaggaaagtagttccagttcaggaagtcaattaggcaatccattaggccagttatgtgacaatccttgtcctactttacactcttcactcaaaattaatctccatggatggaagacagttttggcatctccttcagtggatacctgtcatgctaaggtccatagaatgaatatgtagcagattaggctgacactgacacttctgtcctcagtacacattctactttctttaatctttcacagaggagactattaatgcaaataaaggatagtcagaaataaagaagatgctttcagccaacaattaagcctgagaataaaaagtaagcaccaccattacacacaatgcctggctgctaggtcaacctttccaggtatgctaataccctgaagagactgcaggctgaagggcattggaagtcagtctcctcagtgtccatctattgacatctctcaggccttggctggtgggtagagaggaatcccaatttatgtaaagactaagcatgatcaagctttgtgtgtgtgtgtgtgtgtgtgtgtgtgtgtgcgggcacgtgtgcctgtgtatgtatgagagacagaatctctctcttttacacccacccacacacacacacactcctgtattttttatgtgtgccaaagtggctgacagaaaatgaaatctgcatgagatactcatttaaagcattgcaaaactgcatggagctcctggggcagaatggtggcttgcacagcccagaaaatgaccattaaaaacaattggacactgtaaaaggaatatgcagtttcatagcaactgataaaatctccatataaagggaggtgctaaaacaatacaccactgaggtttatttcattctgccatttaaaaaaaaaaacaactaaaacatgctccaattgaatgctgcagtctatcagtaattatcacccgcccagcactaatccctcttagctgcctcacctcaacccctcccatcacacatattcattcatatgttcctttcaaaggtacacacaaaaacaagcaaacaaaaacatgagcaggccttcgctttttcctctattatctaaaggaggcagcaaaacaaaaagcttaagattaattttgatctgtgctgctatttctgaggcataagcagttagatcctggccctgacctcattctcaaaaagctgcaaagagaaggggtgtggccagaacccaggagaagggcctcttctccattcataaacagctgatttaagactaatccctgtccatttggctccctgtgtgtgtatctgtgaatgctgagcatctgtcagagctggctatataggcctatgccacccaaagccactgttgcagaaaaggactggaaagaagcccttgcaaatggcatctacatcattctgtaaggaactcaaaatctaagacccctgcaatggcaatgatttcgcagcatccagatggccaatgtagctgatcctaatttgctccagctgcctccacttggagtcagtgatggggactaatgcattccttatttaagcaaatcagccagtgacaggaggaggccaggaatcctgctaccctctgaagatgaaaactcaaatatcagcatctctctgatagggtaagagagggaagaaatccaggagggaaataacctccacagctccctggccctgaagactctgttgaatggacatgcatttgggtccacgtattcagctggaaggcctcctctcaatgagatacaggataggcaaactgccccatgatgtacgatgaaatgctccctggggagatgatctgcctctcagtattaaggtaactgtgcacgtagtcttgaaacttgctaaatgcctctttatcgtgtcaggcttgatcacattgtcagcccagatccaggtgctgcagaaaacacatcaatactttggatgtggccatgaaaatagaatccccatcagagacttgtcttctctaggcccctagcaaagccaccttagaagtgtcagtttagtctctctctttctctatctctctaacaaatccccattgtctgagaactctaagtttgaaaacacaaaatgattacattttagtctgcatggtaatggtattattatagagcaccccaaatagtcacctaagtatttaacatatcctatacataaggcccaagaaaaacagaagatgggaggccacttggagtcatgaaatatactcttttttttttttttttagacagatcctcgttctgtcgcccaggctggagtgcagtggcgcgatctcagttcactgcaacctctgcctcccaggttcaagcaattatcttgcctcagcctcccaagtagctgggactacaggtgcctgccaccatacccggctaattttttgtatttttagtagagagggggtttcaccatgttggccaggctggtctcaaactcctgacctcaagtgaaccacctggctcagcctccccaagtgttgggattacaggcatgagccactgcacctggcaaaatatactcttttttatagagtcattcttctgtagattaatcccatgctattatgcaattagtgataaatcatatagtacaggtttagccaatataaaatgaactattgcctagatggatcattagtaactgggtaaagatagaaaaagtagggcccttatctcaatatcctctcctttcccaaaatgtccttcctttctacatagtaccactactctaatatctcttcacgaagggctgaggccattgggaatccttttgcaagcttctatagtttcagggacaaggaggacagaagcccaagggacatggtaaaatgaggccaaggaaagcacagtaccccagaaagcaaagcatccctgccctacagcagctgagtcatagaataagacaataaccaagcatgtaacaaagcattgtcccacacaagggcttgggggcagcagtgtgatacacagataatttgagcattgcctcttagggcacttctgctagcttgcttgagagcctgtcctggttgctaaacttgccatagtctgagctcaacaaattacctcagccatcttggacagtatgaattgtcaccttctcagatttactgaaaacacccatatactgtgtggagatattgagtactcggtgtgccagattcctaaaaacaaaagcaatttgataaatgtcattggaacaatggtgtttgagtcatctattttcaaaactccaagatcaaacaagacatgtgtttgcacaaaagaatgccaggaacacacatacacggtgtatttttttttaagggcagggtgcagtggctcatgcctgtaatcccagcactttgggaggccatgacaggtggatcacttgaggccaggagttctagaccagcctgtccaacacagtgaaaccctggctctaccaaaaaatgcaaaaattagcagttgtggtggtgcacacctgtagtcccagctacttgggaagttgaaacaggagaatcacttgaaccctggaggcagaggttgcagtgagccaagagtatgccactacactccagcctggacaacgaagtgagactctgtctccaaaaaaagcaaaataaaaaaatataaaagtgggctgggcatggtggctcacacctgtaatcccagcactttgggaggccgaggtggggggatcacgaggtcaggagttcgagaccagcctggccaatatggtgaaaccctgtctctactaaaaatataaaaagttagccaggcatggtggcgctcacctgtattcccagctactcaggaggatgaggcagaagaatctcttgaacttgggaggcagaggttgcagttagccgagatggtgccattgcactccagcctgggcaacagagtgagactccatctcaaaaaaaaaaaaaaaaaaatctgtccctaacacctgatgcaaagaaggagcctggtgcaaaatggggaggagagaggggaagtccatagccatctcgctagatgaaaatcccggtggaccatgaagatctttcaaatgtctgacaaggttcatgaaagttcatgaaaatggacaatagcacagccaagcatagactattccccctcaggtgatggagcacttcaggaaaaaggcagattcagtgatgtgagtatagaggtgattgagttgggaaagctggctcttagaaatatttcctgttctagaacctggactggagttgctgcaattaggcccatatgctttcagcgggtgtgtgaggcttcacggccttgggaggcagattcagagccaaggctcacaaaggtggctaccaccagaatccagtcacctgaggagctttccttccaaagcagagatgccctcatcccaccctagggccagcaaatcatgagctgggggaggggaagtctgggcacctctttttaacaagctcctccagtgaatctgacaatgggagtcactgaattaaagccattaggagaaaccacttagctcaagtcagagattaatctacaaatgtcgccttaacaattagcccattagaacatatgtatgaggcctgcaggcttagagaatcgtgctaggagtactagaaaaagtacagagaggaggatgaattaattctctcctgagcaggttttacacattcttctcagctcacagcagaacaaatgaccctaattaatgattctgcatgtttgatcagggtttatctgcctactgaaggcagagacccttctcagaaaatggacaattttctatatatgatcccaaaggcataggactttttaaattgaagtatataatttacatataataaaatccactatattaaaaaatacactttgggaggccaaggcaggaagattgcttgagctcaggagttcgagaccagcctgggcaacatagagagaccatatctctacaaaaaaaactttaaaaaaattatccaggcatgatagcatgtgcctataatcccagctactccagagggtgagtcaggaggatcgcttgagcctgggaggtggaagctgcagttgagctgtgatcaaaccactacactccaacgtgggtgacaaggcaagaccctgtctcacacacacaaaaaagaaaaaaatagatgtgagaactcccaaggcaaaacaatctggtgacattttgttttttgagagataatatcattccaacatctaaattataatgtttttgtcctggtgaatttattaataacaatgccaacaaacatttattgaacacctatgcacaagggccagagtgagagacagagaaatgcaaaactgaaacagttaagtctggcctggcctttgccctcagggagcatgggatctagaagtttaaattactcaagagtcccttctgaatgtaagaagcgctacacatatcaacagtcatctccaggatataaaggaaggatcagatcaggcagagaagcaacaccaccctcatttcagactcccaaagtggaacggggagagaaagtgagaaatggaaaaccaaggaaaaaggaagaagaatttttgacattccaagtccacctggctgttctaggaaaggacagacaccagtgatatggtttggctgtgtccccacccaaatcttatcttgaactgtcgctctcacaattcccacgtgttgtgggagggacctggtgggaggtaattgaatcatgggggcgggtctttcccatgctgttcctgtgatagtgaataagtctcacaagatcagatggttttataaaggggagtttccctgcacaagctctctctcttccctgccaacatgtaagatgtgacttgctcctccttgccttccgccatgattgttaggcctccccagccacgtggaactgtgagtccattaaacctctttttctttataaattacacagtattgggtatgtctttatcagcagtgtgaaaacggactaatataaccaggcacacaggatgagtgatgtggagaaggaagagcacaggacacagaagacctgggtgtgaatctccactctgcccctataagcaacatgctcttaagcacgtcacctaatctctctgggtctaagtttcccaatctgtgaaataatgagattgaaacagatgattatgagatgggaccttggtaggaactaaaaacttttggcttgaaaaggtagccctcacttatgctaactgtaaaccatgtatacataagtctgattcaacatgctgacaatatgcctgtccctaaatctgtatgcaggagacttgtttcataagatcacaagaataaactccatagacactcagattcatagtttgtgtttccagcagcacaatcaattgctcatgcagaatgtcatcccacaaaactaacacaagacatagaagggccatggatcagctttctcctgagtctgggtctcagctctgccatcactacagaaaattgagtggtggtctgacccatcgcctccctctccttgcctctgtgagctttgaaaagcccatgtttttgcaggctttagccttccagaagctcagactgagtctcagtgttttcctaagggaaaaagaaaatgatttttttctctttactgtttagcaagtatagttgatatgttcttgtcattcctaagtcatgaatggttctcaatagaagaagatataggccaggtgcggtggctcatgcctataatcccaacactttgggaggctgaggcgggtggattacttgagatcaggagctcaagaccagcctggccaatacggtgaaaccccatctctactaaaaatacagaaattagctgggtgtggtggcacacacctgtaatcccagctactcaggaggctgaggcaggagaattgcttgaacccaggaaacggaggtttcagcaagccgagataacgccactgcactgcagcctgggcaacagagcgagactctgtctcaaaaaaatatatatataatatataatcttgccaccaaaaaaggatttttgttatcatacatttaaaaatatctgtaatatttctgcagagccatttaatcatccataggtcccctaaattaccaagctagcactatgaaacatcacatttgacttatggaagcacatgcacaaaaatgctgtaaattgattcactggaaaccaagactccaaacaacggattaagtagagatgtattcaagatgaaagaaaggaagaagaaagaggggctttgtagttggtatttgggattatagcattaaaataaaatgcatgggattgccagataagagtaaaactgatttgttcacatgtaaggaaacctagtaaaaatctctatgattttacaggcattaggatctggtgcttccaaaagtgcaatactatgaagccatactctgtgtgcaatggactgaattcttaggacacacatgtaaatcggagagaatccctccttaaatcacctcaaatgtcctccataacttttggtatgaagaaaaaaaaaatccttgacagagtccacaaggccctgaaagctctggtcttttcctcctctctggctttatttcacatgcttccacatctagactccaggaatctaacttgcagttattctcattctccatttgcctcctcccaccccaaccaccacagagccttcgcacaagcactttcctcctcccagaagcctcacctgctcacatgggatgcccatccttcagaaatcagctctgctgtcacttccctgcccacaggtattctgttttgtgtagcagttagcaaagcagcaattttacatgtctttgtgcaatcattttgatcaattgctctcctctttcctttgctggatggcaagttctatgaaggccgggtgtgtgtccatttttagttatcacgaaattccaagaaagtagcaaagtgtctcaatcagtatttgttaaataaataaatatgtggagaaaaggctggagaattagtttgaagactgagtgtagtggaagcaaaagagaggtgggagaaacatggattaccctcactgagtgagaccctgaagtttataacccggaataaaggtgagatgcagttccaggtaatggcagcatccaggggatccctggtgaaagtggagcaggaagaagagcaccgcggtggtagaggtcgagggtctgagacacacacagggatagcaaggacagtcctgcacacagactcaaaggggatggggggagctgaggttgagaatagaagaggacagggccatccctgaatagggggaggggcctggacttagatgggtgacagcatcaggaaggacagagagaggaaggatttggtcggatggcaggagcctggagaaaacaggtttctacaagaacagaagggcaatgaagggccagagtgtccagcactcctgggttacaaagatggcccggcatggtggctcatgtctgtaatcccagtactttgggaggtggaggcaggtgggtcacctgaggtcaggagttcaagaccagcctgggcaacatggtgaaaacccatctctactaaaagtacaaaaattagttgggcgtggtgctgtgcacctctattcccagctactggggaggctgaggcatgaaaattgcttgaaccccagtggtggaggttgcagtgagctgagatcataccactgtactccagcctgggcaacagagcgagactccatctcaaaaaacaaacaaacaaacaaaaaacaaacaaaaacagaaacagcaacctccagagagaggagtgagggaaacaactatgtctctaggaaaaacagattcaactgaggtggcagatatagggagcattacgtgaagaagcagagaattcagatttgaatcaggactaggaatctgtgaaaacagatgtcataagaaagtgagatggagaggcataaaataatggaaatgccaacgttccaataataagtgaatatatttgtgtgtatttgtatgcacacaaacacgctgcaaggggcacagagacaaactgtgattcctctaatcagaaagaccgggtctctgtcagtatttattaaccacctgggggtctctatcagtatttattaaccacctgcatgccccccagcagtttgtctctgtccattttcaaatcaggtcacttcaaagtgactataaatacatacgaaaccctgggaaacaacagggttccctcttactataagtttactataaatcatgcatccatcagtatatagacaaagttaactgcaatcatggacttttttttgagagggcagaagaaaacttgactcatgcagatagacacagtgtctgaattctcattttttaatgctccccaaagaagaatctgggacatgattactacaagccaattgcccaatctcttcccttctgaggcctgtgacataactatagggccagagttatgtgaacttctgcaggttcgtgttccccaaacatcgcaggagtgttgtcctacatcctggattttgttgatgatgttcatctcattttgcccaaattaaaaatacagaaaagttcaatatattcctcctagggcttaatttattataactgaaatgagggaaagcagttgtaacaggaagtcagaaaactttccctaaaacctgtgtccttcctgcaagccgaggtttaatgacactgaaatcttacatcattgcatcataaaacttaaaaggttgctttttgcataattttaccaatgacattaaaaccgatgcactggcaagcatgataaaatcttccatttgaggtctaaagttggaagacctttcctgtccaagtattgaaaaacctaggggaaaaagttccatctgctggtggagcgctcaagtttgcagctaatgagctttttaagaaattgtctgacttaagtgcatgtgggtttggccaactggatttttaatttaattaggtttatgagatgagaaatcttctgtagcgtagtcaggtcagaagttgccactcactgtcaccaaggactaaatttgtggctatctttgccctacttctcaaaccctgccagttgttaaattacattaaaggcaaaactggaatttaaagctgggactcaaacaaatacttatatgcccatgtttgttgcagccaaaaggtagaagcaacccaaagtgtccatggacagatgaatggataaacaagatgagatctctccatacaatggaatactattcagtgttaataaagaaggaaattctggtccatactacgacgtgaatgacccttgaagacattatgctaagtgaaataagctatacataaaaggacaaatattgtgtgaatctacctaaaggaggtaactagagtagtcacattcattgagacaggaagtagaatgatggttccttggaagtgggagagagggagaagtggggaattattgtttaatgggtacagagtttctgttttgtaagatgaaaacagttctggatatggatggtgatatggtttggatgtcttccctcctccaaatatcctgttgaaacatgacccccagtgttggaggtgaggcctgatgggaggcgttttggtcatgggggtggatccctcatgaatggcttggtgtccttccagtggtaatgagttagtgagagatatgattgtttaaaagagtctgggacctctgcacttctttcttgtccccttgctcctgctccctctcttgccatgtgatacaccagctctccctttgccttccgccatgattgtaagcttcctgaagtccttaccagaagccaagcagaagtgggtgccatgcttgtacagcctgcagaaccatgaaccaagataaatctcttttctttataaattacccatcttcaggtattcctttatggcaatgcaaataactagtacagatagtgatgatgattgcacaatgtgaatgtactaaaagccactgaattgtacccttacaaatggctgaaatggtaaatcttatgcatattttactgcaatttacaaaatggaaggaaaattctgagaacccacaagtagaattcagaagcatatgtatatttaaaaactcaaacatcataaccctcccacaggaatactgacatctctcaattcaatggcagtgggtatctccaagaaacttgtattacatgcaagtgactcttccctctctagagcattgatcttaccccctaggatgctggaatttctcctttcatttccagaatctatccccatgtagccacagagatgttatgtgtgtcccgcctttcccttgcactgcactctagtctacaaccaatgcccaaagttggctatgatttttttagagaccttattttgtctttcggtaactgtagctaaagtccaagatataattaggaactttaaaagagtgttcccttcatcctataaccactttacaaacactcaacaatttcctctggaagataatgaaacacacagagggcatctggtccctaagactaaacctcaaggtcaagcttggttgtagctcctcagtggcttaatggaacattgaaagcacccctagaaataacataaaattttcatcttctacagcaaggattttggcaccaaggtcttactttgtaaaaggcttatgtaaaaggcttatcagtgcatcccagaaagcaatgccatctaagccctatagtgtcaagggagttggccaaaattgctaaatgaccattcagctgacgatatgacaccaacatcggctgtgcaggtgcatgctcacattcctggcaccaaacatgtcacactccattttctcctctgcagaatcgaatctgaccataacaatggactgggcttgctaagaatgatactagcatgcctctttgttaagactttcagtgggttgaaatccaggtctccaaagagaaagccctaacctgtctacttctgacatctctccttcctgccctcacctcagaaataaatggtatttttgtatttacaattgaattcttacagacaaactacccttcccgaatgaagtagaaagtttcacaagatagcatccctcatgctcaataaattcccactcctacagcctggaaagttggaaggcagagtcagcagcataaacctctgcatgtgtattcgcgcaagtttcgaaagcctggcccacagcccctgattccaccttgcttcctacaatggtctcaccattctccctctcacccagtgaggactgggtgataataatgcctctgtgccccctctagcacaggggacctagagctctggctcactggagataaacagtcagaaaaccacatcctctacatgtgtggggcatttgtttgagggtgggtggatgagaatgtggtcaggtaacccaagctttccttcctccttcagcctcacacttttgcaaacaaaagagaagaaatggagtctgtctgtagaatgtcacttgttatcttctcaaggtcatttttaaaaaggaagatcatgtgtatgatgttcgagtatgcttcatagttcagcagaccaggcacaccaggtacacagtgaaagaattggcaagacaagggccagaaaatgcgtggagatctttcattgcacagttttaagagctttgacatagttatcaggaagaaatcagaattgaggtgggctcccttaagcttactgcatggtttttccatgtgtcaaatttatatgtgaggagaaccttcatcctttcagggtttacggtctcttgctgtcataacccgcctgcatatttcagcacagccccagcctgatcaccaatttccatccctcatccactccatcagaagatctttatgtgctagaataaatttctcttaacctcccacaccagcctacaagtcattcattcattcattcagtgcacaaagttgctgagtatccactacaggttcagagttgacctggcaggggacacaaaactgaagaatgccctttttttctggaactggaactggaattttcattctcgggcaaagcaggatgccagaagccagatgatgttcatagcatcaaaagactcttttttttttttcctgagacagggtttcactctattgcccaggctagagtgcagtggcacaatctcatctcactgcaacttctgcctcccaggttcaagtgattctcctgtctcagcctcccaagtacctgggattacaggtgtgcaccaccacgcccagctaagttttgtattttaagtagagacggggtttcaccatgttggccaagctggtctcaaactcctgacctcaaatgatccaaccgccttggtctcccaaagtgctgggattacaggcgtgagccactgcaccctgccagaatgtgcatttctaataagtttcaggtgatgctgatgctgctggttcagagaccacattttgagaattactgcttttaaccttatttataaaagataaaaagtttattctttcaagatattctttttctttgaacatgggtataaaaacattttaaactgtttaggtatgtgccatttggacaaaatctctttaatatatctataaaaatatactttgaaggcttccaaaggggagaaaaccggctggagctctttatcttgaattattgttcaaaatcattttcagagtctagttcattgggctggacaatgccagcaaggtgtttggtttttaattaaagttgaaatatcatctccattgaaaggtacctcatgaatttaaccatgatgccatggctgctaaaaacaaaacaaaacaaaacaaaacaaaaatacataggcttaggctgggtgctgtggctcatgcctataatcccagcactttgggaggccgagatgggcagttcacttgagctcaggagttcaagaccagcctgggcaacatggtgaaatcccatttctataaaaaatacaaaaattagccaggtgcagtggtgggcacctgtaatccctgctattcaggaggctgaggcaagagaatcccttgagcctgggaggcggaggttgcagtgagctgagatagcaccactgcactccaacctgggcaatgagagtgaaaacctgccaaaaaaaaaaaaaatacctcgtaggcttagatttctgaaaacatgcttccacccagaaccataaaacttgtaaaggtgtggctgaggagactttgggttccaaagaaagcattcagaaagcaccacaaatgaaaaataggagttcatcaatatactgtttcctttatcattagaaagaaacagtgctaaaaaagaagaatgtccacatgacttccaaaaacaaaggaacccagggtcatgactctgtctgtttttcccagctatatctaagacttagaggggagagaacagctccctttgtccaggttccacccactgcaagaactttttggcaataatatgacttctcttgtgtgctctgtgccagccaaacttcgtaagaatgctggccagcttggcgcaccctctccagcattacctatgtttgttatttgaagttgccatgctagattttactttaaatgacatttcaagtacacagggtagttgaataggtttaagtcttgttgtttcttttcttttcttctattgaataatcaatccattcaggcacagaaagatcaactcttaggcttccctaattaccctgaatctgctacttcacccaagggacctcttgaaagaccccaaggatgctttaaacaaagcacttcttactctttattgtagtcatgagttttcttctgagtctcttgtctgtgatctcctccttgaggatggaaagggtatcaatcatggctgtggccccaccattcactcattcatttattcaatcaatgtatatttattaaatgactgctgtataccaagctttgtgctaagcctgaatatgcagcagaggaccaaagagccacagcccttgccctcatgaaccttacagtctgaagtagggacagacactcaacaaatgaccccactagtgagtaaaatttgcacatgaattaggaggactctccagagaaggggcaatgagctttgcaggctgtggagtctaggggtgttccatggaaggaggatgagaaggagtgaagaagatgaagactaacattgctctcacagaacccagtgcatctaaagctccttaatgcttcccccatggatgcttgttgagtgactggatggacctaggcagagttttgcactcaatgtgacagactggggaggagctctgtgtggagcaagcgatgaagtcccactgaattcaattgagggaggacccactgtcttcaaaaaggaagaggcatctccattctaaaggtggagcaactgaggcccagagagcttaaatgccctgtataagaggcagagcttagtctcaaatccaggtcggactccctgcctttgttcttttaatccatgactccaaagctccttcctgaattggtgggtataaatcctcctgtctctcagaaacttcttctccactttcccttgtgaaactctgtttcatctcatcagctttccagagttatttggtgaaagagcatccaaggcaggaagatttttcttggatcgctgtgatggctgcaccctccaaaaatgggttcacaaagggtaagcatcggccccactcattttcccaaaccatagcaaccctctctttctctccaagaaaattttaagttgcctgcatcactgtacatattattagcatattttccaatctcatatcagaaaagtcttctaatgagtcccaatctaatgtgacaatcatccaacaatagaatggctgctgcatgtggcactgagctttcagtccctggggacatttaagttgacacaggagatcacctgccaagaataccataaaaggaattccctgttatatcagaatgctgactgatttctgatggcattttaataagccaagaatagacgcttcttgacagtagaccctgccaagtgaatatgcctaaggagactctacttcccagtttgcttgatgtcctggaataattattaagagcacctcctttccactctcacaagtgccctgagtagatgccaaagaatatggtcatccaatttaagttgcacttgggtccttggagagaggcctaatacatcctgacacactggctgccaaacatccaggagaagatggggaagcacagttgagaatctgcagtgctcctgtagccactctaggagagtttctagttctctgtttagtaacctgatataccagcaggcgaacgacaatgtctaaaacctccatagttctgtgcctacacacaggcacacacacactaaaacacacacacacagacactcatgctgttcgcagagtataggagattctccgagagaagccagtagcatttccatgctgctagtggtctgctgatgagtaagtgttgtttttttaaggccttgtctggcattgaacatgattaataaattgctggagatgatggggactgctctactgtgattgagttactggaggcttacaaggatgaaaacagggatctctagatttcagatcaaaagcagtccataaaacacagcccctcaggtcatgggaagtggcatccgcaggcttctcaagatcgcttcccggtgaaaagagtaaaccagcctctgatcccatactgaactctaactcacatggggttcgaatgtgtcatatgctctctgtacctcaagtaataaagcagggagtagtgggagcccatcgcttatggctacttttctcaggaaaacttaagaccatgcaggatgggctggctcaattttgacagagagggtgtctctgcactgctaccttagtgcgcacagtgatttaatgaatacacgcctcagtagtgactgaacaaaagcagtctccaggagacgctgcaccaatgcaaagaaacacaatccaagcatcttgtggcagaagtcccagcagtccccagcctgggaccaaaggaggcctggccaagccttgatataagctgctttcccactgcacaagggcagagtccccaagtgaagaactgccccagttctggctcaaggagttggtggtcactccttgtcttcatttcaggggcttctagaagaccccctttccccgaaaagtattctctatctaagagcctgaaatttcaccattagagattacttcctttcaattttaccttaactctctttcttggacttcttaaaaagcacaaggaataaggagcaaatccatactgagttgttaatgatttcacagggtgatgttgaaatggcagcctactgaatatccacttgggctgtaggttacaagtgcatttccaaatattctgattccaaaggtctgatgaacagcttagaactctgcattttcaacaggcaccctgcacccccatctgctgtaattctgaagcactttgagaaagttcatttcaatgcaccatatcctctcagggaaagataacttcattcagagtttttaaaacctggattgtcaggttacaccccagagcaattacatcagcatctctgtggggaagaccaggtatcagtatttttctgatgtattagaaaaagaaagctccccaagtaattccagtgtgcagtcagggccgtggccacctgaacagccaatgggtgggatcttaatgctaacacagcagagcaaatggaacatgtgactatctccagggatctgggctgcctgggactcaggtctctgcactggcgaagtgggcagctacctggtcttcaatgtccccacttgagtgaccctggaggagtcttcagttgactcagttatggaggagccccatctcccctatacaaacccacacctctccttgaaaccacggtgatagggaggctgccccaagctgtacctctgaggagatacaggtaagtagaggctgggacagagccagacccagacaatgattggccatttgctgccacttggatttcagtagcctgagttgctttggcaggctgttccctggctctgtggggtccctcaagcaagcacagccctctcacctcctgcttttgggcacctctgggaccaggtgcaggatttggccctcaagcattgtgctgggtggatagctgcttcctgccagtggcaatgcaggcctcattccttgtcaaggaacaggcaagggcagaaggcagaagtcacatatggttgagagactctctaactccaactaaatccacaccatttttgagcaaaatgggggttgtgttcatgtatgagttcccaccaatctctatccatgtggcaattccatctgcaaaacccaagaaatagtggtgcatgttggtcccggggaactgggaactggagtgagctcagcaagagcccagaagtccgggagaactggtgcttaggatgatggctcaatgtccacccaaaacacagccgttatttcctctttgttcaagctctctttctttcctttctttcctttctttcttttcttttcttttctctctctctctctttcttttttttttttccagggtcttgctctgttgcccaggctagagtgcggtagtgcaatgtcagctcactgcaacctctgcctcctgggttccagcggttctcatgccacagccactcaagtagctgggactacaggtgcacaccaccacacctagctaattttttttttttttcagtagagttggggtttcactaagtgattggcctgcctcggcctcccaaagtgctgggattacaggcgttgaggcaccgtgcctggcccaagcgctctttttagaggcttgagggtaaacttcatcccagctccctctaatagaaatattcaaagattcaagccacatttgtaattttgaatgtcccagttagccacatttcaaaaaaaagaaacatataatattagtgtgtaaagtgtttcatatttaacccaatatatccagaatatttttacttcaacatgtcattaatattaaaaattcctaatgagatactagaaatacttcatgcacctgacacccccactgaaatataacagtgtttcatgtgttgcaacaattgttgcatcttgtgaaaattagtcctaccaaaacaacaaagtattgtttaacagacaaacattttatattccttcagtttttaggtttatatttttgttaattaaagttaaacacaaattaaaaactcagttcctcagttgcactggctacactgaagtgcccaatgggcacatgttgcaagtgggtaccatactgggcagactgagaatgtttccatcagggtggaaagtccttagatcccttaaataattagaaaaggtcccaactctcattctgctggtccaggctagagacacttagaagtgtcctgagtgacatgggtgctctctcgtctcacaaaaaagaagcacaagagttaagggctagaacagcataactagaacacctcccagagatgtggcctagagcaggtaactctcaaggctcagttcctgcctctgacagaggagccgaagatgagcatctaccacaaagaggtgtaaggattgagtaagttaatatgtttgtaaaacactcaaaacagtgcctggcacatagcaagctctctagaagtaagtgctaaataaatccccagttcaatggctgccagttggttgccagacactctgacatctttcatcccagaatggccttactggaagatgcaaaaaaaatctctcattgtgaacagctcccagccttctggctgccaaaattatacattgattcacctgagccttacctgatgcaaaacaccacaaccccacaccctgggggaaaaaaaaagctcagatactctgaaatgttctagaatgtctgtccctttcctatcctccaaaccatatcttcctgaccctccaaggtgaggacagaatgccatcccttctccaggttatttctccttattcaggtctgagtccaggccagctcctcctacaaggcctttcctgactatcctttctaaagcacgactgagttgtgagcaagcaagtacatgcagttaggtgcacacagcactggcctgtcccctcacactgtttcatttccttcattggcttatcattccctgaaatcacattgttgacttacttcttacttgtctattgcttgcctaacctcaaaagaaaataaattctgtaaggacacagacctggtctgttcagtccttgctgtatctctagcacccaggtgtgagtacctagaacacagtacatgctttatatacaattgttgaatgaatgaatgaataccctccttaaagtataggttcctatttccccttgcttgatattccaaagcactttccatctttcatattttgaaggcagtcaattccataatacttgatacatacagttaactatttttgtgtatatgtcttatctccccaactagacaataagcccctttgatggtatgtcttgaatgtacatccctcctgaggtcctcttgcatcctcaatgaatacttgttgatgaatgactgggaagaataaagcacaaatcttaaattaattttcttggtcacacatactagactatttctacaaataataatttttaaaatgaagtaaatatatatatatatacacatgcatctatatatgtgtattatgtttctcatcctaattaaatgaagctatttttgcaactgttttccagtccaagtgtaaaactgtaaagaataatgctaaatgttagatcattaagttggttttctttaattatatggcagtgtttcaaaaaggctttgagtcacctttaagattccttgccaggggtacagcacactacatttaaaatggcacttatcttagtaaacacatttctattgcaaatgatttgttccaataagcaatcccttggcaaagagctgctatttcttctagaccccctaccaaaacatggacctattataagcgccagagaagagaaagcttaaaaagcttcctttatcagaagttaccaagatacattccctaaagcagaagcatctattcatctacccttttctctgatttcaaaacctatagcacttactttttgtaaatatcttctataaggtagctgtaaataagtcctcaaaacctattgtgaagtaagctatagatgtaaatatacattcatcttttttctctctctcattttctttcctcctgcctctctcttattctccctttgtttctgtttttctaaaacaaaaatcagtaggttggtcacaggcaaatacaagttcaatttctaccagaaagctgagttcttgagtgattaagcatacaaaccaatcatttgaagggaaaaaaaatccagtaaaggctaaattattttctgaagtacttattacattacatgaagagcttattatgataagctattatacttgcaagatgaattgaattcacattcaggcaactcatctattcctagagaaacacagataaaaaattttatagcaacctgaaaaggtttgtggaatggatataaaagagatcaatactataagattttaatgtcaaattgaaacaatagaaaacatggtccaaaacaaggtctcaatttccaataaaaaggaaaagaagagataactggtgagcagaggagaggacagtccttcaggcaggagtggctggggaaggacctggtggaagtgtaattaagctgtaaaggaatcatggatagaatttggagggtggaaagcagtccacctgtaagttcatttattccacgtgtatttgttgatttcttactatatgctgggcaccattcccagcacaggggctatcacagagaacacatgacaaagaccccttattcagatgatattctagtggggaaggcaccacttctagaaattagttatgaaaaagcaggcacccttttatgtttacgtgtacatacatggaaaggaggcattcatgtttttgttttctactgcccttctcttgagcctggaaggttttcctttgtactgatggctagcattcctcttagctttgtggagatttgccttgcaaacaaagagttccctctcttccctcttgccactgtttaccatggggatgcagttaaggatcatgacaagccataaaagatttctcctaactctttcaagtatgactatcctgattatagcctccagatatggccagccagaatcacacactatttataggcttaacccacaggcagaattagtcatgtatcacacatgactaaaatgcaagactctcccagacctagggtcctaaacaaatcccctctccttccctaaaccttccaaagaagggcagtgaggatgcccccacaatgttcttcctacagacatgtttatttaagatctcctccccatcccctaatcaaggaaactacacaactgagctaatcatttaaatgatgctactgagaaacgaagccattttccttgttaaaaatgtgcttgccaccctatccatttatctatttccttggcagtgctcactgttaatttattgcccaataaagcacagacactagcagagctgctgaaccatgcctagtggaagccccactatttcatcccagcaaaggcaactgacaagcccaaagcacaaacacaaacacattggatgccacaaagccgggctggctaaccccgactccatttgtcatcccagagacacagaagggagggcggtttacagccttctggagaatgtaggtgattaataactatcgattgtcagaggaaatggagtaagtttggtcggttagccaactgccatgggttttctttctattggatggtaaacctcactgccgcagaagccatctcatggtgagttttgtggggagagaaactgagaagggaagtgatgaagaccgagatggggcagccttggctggccatggtgtccaccattcgggcagattgcctcctgttgcctcctgcagctaacacacagccatcactcataaagtcccaggcagatgtgtgcttttagtgcaaaaccttggcaatcattatcttgagtgtggaggggcttttcttttcagagtctccttcatgggcaactggatcaaccacacagaaggcagatccttcttatttggacagcttagacctcagagagcctataccaactgaatatttgtgaggtaggatctgaaagcacaaccctgagcttcaggatactctttctgatgtcttgactagctccagtttgcctggaggtttaaaggaaaatgtacccagaaaacctgggctcttactccagtatctgtctaatacaggaggaggaagccttctcaaagccaaaagaacagaacaccaagaggggttccaaagattgggttcaaaaaagtcattgaatgttactttgagaaggaagcaaggtcacctagtcgtaagcctgtattttagaggagaaaactgggacccagagaggaattgacttgtccaacgccctattgtgtgttatggacagaagcaaaattaggaggatgggtgaaaaagaaggaagttccaaaagcccacagggtctgccttccattgccatagtcccaattgttgctcccctagtgagggcacagctggcctaaccactcacaggcaaaagacataagactacaacagaccccacaaaacacatgcacatcatccactcctgcaggaagttgtgagcaggttgccctgctccaccatcactgctcagcaggaggtagagaggtagatgagaggagcacaggacctgagaaccaggagaaaaggatggcaagggaggcccagccccagccaaggcccagcccagttatgtaatccaccctgggaggttatgcccgctgctttccatccacggattttgcaggatgggtcttcactaggaagatgggggaaatgtcccagagggaatcctcaccagccctgtcccatgtcaagttctttatgcctctgaaccttcctcaaacggtgtccccccttccttgcccttgccccacctctccacattcacagggcatcttaattccctaagctgagtcaacatgagtaccacagtcctctccgcttaaccaggctgctgcatctcagagtgagcctcacagacacgcacagaatcagcacctgctgggcattttcatgtaatttgatgatcacctctgtaataagactcctcaggagctgagaccatccttcgtctaccttctagcattgtgtctccattgggccattgaggccatctgctctggaagttcctgcaggggcctgctaacaggtagatgcctaggcctaatccctgacttgcaaactcagaatcttgagccagttcaggaataactgcctagagtgcctcccacagcaaagggcatactgcagacatcaggaaacactcattgatcacagagaggggcttggcgtcaggggacctaattttaaccttgctgtgtggccctgcggaagtcacttaaccctctggtattcaacttcttcacctctaaaataaatgtcagacatttgtggatcatggatgtgaagttaccaacacagatccaggctcagcaggtactcaattcgagatgtctgtattatgcgtgaggtttgttcatacacagattgacccagtaactaccctgaaccagatccccagggagtgggtttctaaaggctggggactgggcctggcttgagaatatactaatcacacaatatatttataatagccaaacacactacataacctatcatattataaatgaataatactataaaatattaatagcaaacaaaatatggtacatattttgtgccaggcactattctaaatattttacttatatttccccatttaatccccacaaaaaatttagaagatagttctattattattatccccactttatagctgaggaaactgaggcccagggctgttaggtaattctcccaatgtcctgtagccagtaaatgacacacagcggggattcttcaaactcccacaccttcctgagatgtcagctggctgtgtggttcatgccttctcttcattgtctctgccctgagatgtgctcagcaagtggtcgttgccttaagagagctttgccttcccagcatggttgggggaagctctccctccttcaagggaggagaagaaggggtgaggagccactaacagggctcacctgcaaagttttcaggaccatacctccaggccaaactctaatgagaaggagcattcctgggcctcagctccctggggttcagacttggccccttaccataaagaggtcaactaatgcaaaatgcagaggctgcaccatgatagcttttccacgatgggtctgggccaggattgagggcactgtccagcaagctgatgcatttttaaaacttccgaatcattgatactacctccccagggaaaggaagacctcagcagtttctccaacacccagtccacatgccaacctgccagagaagctgggacggaccacagcaaaagcaccagcacccaagctctgccacagacaactgactttcagggacatgaatgacctcctcactgaaaatgaccttccccagggggcttattctctgaacttctggaatcaccaatcacttctccatgtaactgactctacatcaaagtcgatgcaacagatcacatttctcaccactcccactgccccaacctggatgcaaagtgtcatggtctttcaccagattattacaataacctcctaagtggtctccctgcttctacacttgaccccaagtaccacaattggagaaggatgatctccaaagctgcctgggaagtctgcagttacgcctttggacatggactgttgggacttttcagtttctaagagttcaaagaaaaaagaatgctagagatgttttctttccatccaaacaactaaaggcttgtatctttccattaatcaataccaagagctgttcatgcagctcaaatccaaaaatgagcatgctgagtttctcaagtctgtcctctgatgatatgtatataatcagcatgctctgttgtagacctttgtgacaatctgtgtcacttagtacaagtttacccaatgtcatttgcatttaagcaaatggaaaagaattttctcagaccctactatgactctggccacctgataggtgctatagaggacaaaacagaaatataaaatatgattctctcctttaaggaatgtattttttctgatggagagacaaaataaatgcccaacagatagacaaacaaccatatcagaccatttaaccatttccatatggttaaatggaaatatcagtaggaaagatattaaacaccttgggaattcagaagcagatgatcagtttggctagaatggctgggaagataatctatcaaaagtaagaaaagtgataaatgtgtgaagtgtaaatgagttgtagtattgcatcccaacaggcaacaaatatttcgtgcactggattgaactgctgctaatactactttcctctctcctgcatttggaaaaaaacaaggtggtctccgaaatccagcctcaacccaggactatggaaatttgtaatggcagtgaagacaaaaaatattttctctgccatatgcggtcaccaaaagcaaagcaaaaattaaagcaaagtatataggatttggtatggtaaaagtgaagaatcacatgacgattcgttaaagaatataacctccacccaaggggacagttgagggatagcaaagtcattaaagcgtcacagctaaaaggaaaaataagtctttcagctactattatccatccctctgctattcagtttcatgaagtgaagctactggagtagacactgtattacatcacaaatttgttacagacattcctgtaaaagtggctttttcctcatagactgaaaatacacctgaagatcccctcatgatgaataggaatagtccattttagatgagtagattttggaagtgtttccacacttttttttgtttttaggtttttggggggtgtgttgttgttggaagctccagcattttcctcttcaccacctgcagcactgggacagcaaagctgaagaatctcattaagcttcgacaagaccaattttttatttttagccagtcttttaagacaatgtgaactctactacatttagaataattattccatcaactatttacttaaacattttagaggaaaggaaagaaactgggagatgtttaaggctttttataacagattgtttcaagggtaaatagaaaaatccaaatgcagctgctgaaaacacgtaagcccatggcagggtgcccacttgctgcagcggaagtgaatggtgagaagagatgaaagatgtggaagacaaatgtacccagggcatccaatcccagcaagcggacaaagggcagattcataacactactttgtggttaactggtaactttcatcagggaacctcaacacactttacaaataacacttattttcctgtctcacagaagcagggagataaatgccaagcccaaacgtcacacagcaagggtgtgatgattttaagaataaaatccagaccttatttcccagttggtggcctaccaggtgtcttgatatggtttggctatatccccacccagatctcatcttgaattgcagctcccacaattcccacatgtcatgggaggaacccaatgggaggtaattaaatcatggggcaggtctttcccatgctgttctcatgataaggaataagtctcatgagatctgatggttttataaggaggggtttccctgcacaagttctttcttgcctgctgccatataagacttgccttttgctttctgtcatgattgtgaggcctccccagccacatggaactgtgagtctgttaaacctctttttctttataaatttcccagtctcagttatatctttatcagcagcaagaaaacagactaacacatgcctcccttcgaacccacagtacatccccaccatttgctctttccataaaccagtttcctttgaaaacttccagatccttcctcctctaatagagaacaccaacataccaaagactacttcagacatgaaagaaatggtgtgcttatcttgaaatctcaagtggaatggtaaaaacttacctaggttcatcaatgcgctagaaacaccacaaattaccaatgcaggggaaaatgaagtatgctgctacaagggatgcattgacagactccagagaacgccactcttggtaagctgattctgaccatatagaagttattttataattctgtaaattgtacataagtgacagcaatgcaaataattcctgtccatggacatgaaaattctgtcctgtccaagagaagttccattgacttctctcctgcctttgtggaaaaaaacagttttgcctctgtttccacattcatttaaatattactgacctgtaagtgtctgttcttttcttttttgtttatgtttgtgtctttgtttcttcaagacagggtcttgctttgttgccctttgttgcccagactggagtgcagtggcacaatcatggctcactgcagcctctacctcctaggctcaagggctcctcccacctcagcctcctgagtagctgggactacagacaggcatcaccatgcctggcttttttttttttttttcaggtataggcagagtcttactatgttgcccaggctggtctcgaattcctgggctcaagtgatcctttcaccttggcatcccaaagtgctgggattacaggtgtgagccaccatgtcctgcctgtcctcaactggttataacatctgcctggtcccctcattgaataggagtagaataaaatctttaacacatattcattttgatatctgaaagtcatgattttcttcttttgtgaaaattaatttttaataccaattcaatctcagaaatgctcaacctcaaagttagaaacacagatgggaacagcaagagatgttagaactcacaagaggactgatggagaaaataggggtgtagatctccgaacacaaattggaaaagattttcttatgagaacaaatccataaatcagaaaatatctgtgattttatcctctatcttcctaccacttcaatcttgttaactcaaatataagacatgttaactggatccaggacctgagccctggcaagtgccacagacaacagcatgctatccaaaggactgcccttaggaagcccttaggaagccttgaatgcattagaaaaaaagtactctcccctctggctgacacagcaccattctggagcctctggcttagcaaaaggggtacaggttgcatttgagtgctttcttgtaccttcttcagctgggcacctttgtgcagtactcaacctatacaactgtacatggtggccatgaatggaaggaccactcatgacccaggacccaaaaccataacagggatatatagctagagaacagctgctgctaagcagggcatgagagaaactgagagggctgtgtccgggctgactttatctagaccactgagatccaatacgattgaggaaaatcactaactctatggcaccctgctccagccatgcctgggaaccggtgactgccttatgatgggatgcccttttcagggagtcaagaagtgcctgactggtaataaaaaggaatgaactactgatacctgctacaacatggaggaaccttacaatcattatgctgcatacaaaaaagccagacataaaggattacatactgtatgagttaatttgtattaaatgctcagaatagaaaaatctatagaaacctaaaaataggttcacacaaagtagattagtggtttcctacagctgcggtggttggggagcggactgaagggatttccccagacactccaatccatgtgtctgggtgttacgataaccatgataataaaagccagggagacctcagtttgggttaacagggaggttaacctcattttcatgctttgtttttcaacccttattactgactggttctgccacgatccttaaaacatgctcttagcaaattttatttttagtaactatcacttagtctttctccccagctttttcccactttcctcccatcccttagatcccatctctcacatctgtatgttttacccaacaggatggaaagagaacaatgtgtgggggcagatttggtacctgtcatggccttgacctctggcatcaggcttcctctccctaaacaccccagccaggctgcactttcctccatgactcaggtgaaccttcctctgtgccaccacgtggactttgcaaattctgtttctcctatctgcaacattctctcccattctcctcccaccagtcttctttcatcatggatgaaggatgactcttattcttcctcctaatctcaagccaagcattcttctcggaagcctttgttgatctttaatcccttggctctcatagcagaatgtgtgcagggcaggtatattagaatttctgtaggttaaactcataaactgtgggactttgttgactaggtgacatcaagggaaacagaggcaggcttcttctgtggaataattgtgcatccttcctgcccttctaggggtcctgactatctccccagcccccagcctcccaggctccaatctgcaacaacaaagagatagaagctctgataagaaacacaggtggctgggcgggtggtgtgctctgtagtcccagctactcacaaggatccccttgagcccaggagttcaaattcagccggggcaacatagcaagaccccatctctaaaacaaacaatcaaaacagaatttctttgctaattacttttgacataaaaaaacaaaagaaagaaacacaagtgattgtagcaccaggacccctgaagctagctgaatatgttcctgcctctggcagagtaaatgttctctacttttgagtcagaccagtgaaggccaaccttcgtcttaggaagaagttgtggtgccaacataagctttggagccaaacagacttagttcaactaccagcctttacctagtttttggtgctcccattgactagtctgcggcaacagatgagttaaaggagatgttgggtgtgtatcctaacacactgcacaggctgtgttgcagaatagtcagtaaatgtccattttctttcttcacatacaccttcttctttctgcaccaataatttaagtaagaactttctattttctcctctaccaatctcagaactgtctagatagaagttaaaaccacctcactctggctcgaggaggagggagaaggaggcagggtttcatttcaagatcagtcagcccattgcagctggctgtcctgcagcttcaggagaaacaccagtggtcccacagctaaccaagatggtgcctgtcaggcacaacagcttgatagggacagccgcattccctgtcagattcttgataaagtacagcacatgccaggaattctgtgggcccttcaggcacttgtgctgttgacacccctatggctcaaaatcagaagctgtctctgaatttgatgaggtggtagagttggatcctttggcattgagggaagaatggcagaacgtgggtgtttacaaacacttctgtccacttatgtatactgcagatacttaatggagtgctcatcctgtgctgggatagaactgagacaaaaaacagatagtagctgctttcagggaacttaacaatgtcagttaatgggggagacaggtatccattcataatcatccccaatgaatgtgaacccaaaatgaaataagggcatggaagaacataacacaattctagaagagctgctcacaaaagatcaaggtgaaaagaagtttctcaagaaagtcgcactggagctggcatctgaagaatgagtaggtgctatttgggtgaaaggcgtgtgctgtgggaaagggatgggaagaagaggagaaagagagaacagcatgtgcaaacagagggaacagcacatgcaaagcccagtggcaagaaagactatggcgtggtgaaaaattgggctaaagacaatatgaccagggctggacactgagggtgagagtgaaatgcagcattggggaagagaaagtcaattcctaattgttcaggaaaggtgactgggtgataggcatgaccagaagaagagaggtttcctatgaaactctgtactggaaatagagctgccacaataggcaacaagaactaaggtacctagaacaaaatgctctgtcattttgttccctgggagagtagagtaaaattcaattgaacagaggttgagacagcctattgataatttaaagaaaaaaaatttaatgggctaggtcatcatacaggcatattaaaatgtaaaacagcagaaccaaatcaaatttctctttgacaggcttgccctggttttataatccctctttcaggggagactctgttgttgttattattattattattattgctcaagatggtgtctctctatgttgcccaggctggagtgcagtggcacgatctcgactcactgcaacctccacctcccaggttcaagcgattctcttgcctcaacctcccaagtagccgggattacaggcacatggcatcacacccagctaatttttgtatttttagtagagatggggtttcaccacattggccaggctggtcgtgaactcctgacctcaggtgatcctcccaccttggcctcccaaagtgctaggattacaggtgtgaaccaccgcgcccaacgagactctgttaagctgaaaatattgagctaaatgccagtgtcattcttctgtaaatatatgtaattgccatttaaagaactctcaaattaaggttataacagctagtgataaacattccttcatttctcacaatattataatagagaagaggaccagcattaacaaactggcttttcctgttctcccgaaacagtcttaagtgatctcatttatcatgaatttctgtaagcattaacagtttgtaaaatgagttaattatgttctttggaggtttaataaaatctaccaagttaagtaatatcccgatgctcttgaaatttacccagaaaactttaaagaaagaaataaatgcattcgactgagcagaacatcatgtatatttttagaaagcatacattatctcacaatacttatgctaaatatgtaagaaaatttctgatagactctaaatcaagtctagttgtaaaaggatctctcctctaaagttttttttttaatcttcgtatcaatgtataaatattggcatctatgcaagccaaatatattccaaatccaaaagctttggcaatccaaactttgagagaaagaataataaaatctaacctttaatgagaaaaagtaggaatttcaagaacatgcatctattttctacaggcagtggtatgagagaaatagaacagacactgaaacaggtgaaaattaagatgttacatagggatggcatatgggactcattaagtttaggatggtgttttgcccttctttaaaatgtgtttttcttttcccccaccataaactcaatttgccccaggtagtaaactgaaatgactggaattttctctgattagatttctctggggctgttactgggtgttaccacatggcataggggtgaggtgccaggctctggagtcaaattgcctgtgctcaaatgctgcctctgccccttactggccatgtatttttggaaaagccagttactatctctaagttccagcttcctcatctttaaaggaagaggtttgttattatgcatacctcatgggttgttcagatgattagatgagatgtgtgaaaagtacttacttagcacagtgcctctgtaaaggacagcgatcagtattcccctggtggaaacagtggccatgtttacaagatgaaggaggaaccagtccttactgcctccctgtgtaatcaaagtagtcattatctcctattgccagggtttccttatctctatcactcatgtcctgtcctgacaacatatttataatgggactctacctacacaattaattgtgtaattttttttctttaaatctcattctttaaagttcaatttttaaattgaactttatttcactaccacaaatggaaagcccatctcacttgctataactagaaggtaattctaaacatacagcaaaaaagaaaacccagatcatttaaacgccacctcgatcttgtcaccccaacaaagactcagagcctgagagcggaggctgattgccaaagtttagagaggtgttaaagacctggtagaacctagggaagacattctctctgtgttaaagagaatgtaaaagaaaacataaccctctcctcattggagtctgtgtcatcctatgctgggtcaggccaccacctaaaattacgccatatgcccctggtaatacccatctctcacgttgttatctagagtgatttccattgtagtttatggagttttatgcataaacagacagtgttctgtgatacctaagaatacttccaaaattcccatggaaggaggctcccaattaattccagtccattcatttttaaaattgctgagtgaggcattagaattcatagaatttgcagacctgtgaattcccctagccagcagcaatcttattagcatatccgtaagtctttgcaaatttgactagggacggtgtgtgtgtgtgtgcggggggggggggggggttccattcttactttatgcatcctcatttatacaccctcctctctcttgaggttgagtttctaagctgatagatcataccttccatctctgtccataaatgcctttgacccaaatatcatgcaagtccaatggtacacatgtcctctaaaacaccctaagtggaaagcattgcctgttgaggattagagtagacatataatcacgtttcatactgagctatggccttcatccaatacaaatgccacattcacttaggaagggtgtgtatacatgggaaacagcaggggaatcaaggacaacttcctgaatcagcctgctcagcaaatccaaactcattcagccacaaacccagttcattcatgcatcagggtttgcactgctctaataagatgaatggaaatgcaaagacaacacttggagggagtcctctccgtgcactgagacccttgtctgaaaatacaagcaactgctgctgcttcacactcaaagagccaaacattttgcatggataattcagaagcagtacgtcactgccccatacacaatcctcatgttaagggagcctgcatcaggaaagcacagactatctacctacacaaagaggtcattgcaaattcctcctctccttcctgttgcattcactttagcaattttattacagaagagactgtctagtccagaagcttgctcagtgatgaaagaagccaatttgggatcctaaatttgactatagagcattcatatggacaactgggaattacctggtttgtgaactaagcaaaagccaaaactctaaacaccttctgagcatctatgaaaaagtatttccaaatcacaagcattcattttttagatgggagttggcatgaggatctcctgcaaagagagagagagaggtttcctggcatgggatggggagtgctgagcaccaagacacatgtgcaagctgaaagcacaccaagtgctcttctctgcatccagcacctcacacacattaactcaaagggctgacaagtccctggatcactcagcaggcaggcagcaaactctcagagcaaacagagttactgctgccttatcttgagctccactattaacacacttgtcatcactaagccaggttgttagtctctggaacaatttgatggaaagggcaaacaccagagaaaaacaagttgacccagatgggctggcagaggggatcaagtggcaataaactccgttatcactcctggttggcaaacaaaaagctctgcctacgcatgcattccagttaactatggacttcccctcatacatgcatggaaggccattatgcagagaaatgggcacagcaaatcacactaaacactgaaactctgctgaagtgactccagtgacttggagttgttgatctaaaaattgcttattcttgccttgacaataaaatcagagtccaagttaataaagatttctagttagcaaagtccccaagagcaaacagtttattcagatcaccagctttctgctttgcagtgtgaagagattaagggtccagggacactcctagttctggttctgcctgtgtacatcactgagcctttgtagacctcagctttattccctgtgagacttagactgatcagcagttctcaatctgaatgtgatgacagagtagcagaggtggccgaatatagaatcctcaaaattaacttacaaccaaaggctggtatctgtcagtagctttacatgtattgactaatttaatcttcacaataaacctgtgaaggaggtactattatcatccctattttaccagtggggtaaccaaggctcagaaaggctgacaacatgcaagggtcacccagccagccaggtgcagaggtgagactaggaatcatgtggtctgtctccagaaatgctgcttttaactactcaactcttcataatctagtgcctctcaataatggttaataatagctatcagtatggccaattgatggcctgattagaggagatctgaggcttgaaataaaaggctactgatactcgcattttaacaagctttttttgagagacaaagaagtggagtttcataacataacctggagtttgcatctcaaaagtgaacaccatccacaaggccaggcaagaagaaaggttggcactggctgaccacacaatgtggttggttccacctcacttagccatggagtctatgattccttggtgctatgagaaagaatgctgcaatctgctcactctcattttgggaggaccaaagccctgcctagcagcaatgacaatcctggccctaacacagctgggagcctcttgacaggcttatctcctccagctccccaggaagtctcccattggctgtcagatcaagatcaccaaacccattctcctaattagctccttggcaggcaaaccacacaggagcagttccctttccaccttgaacccagcagacagtcccactccccagcatcagccagccccaaaggcacagggctcccctaaggcctgcatgccctaagtgtctgagaggaccccatgactacagcacatgtcactaagtccctaacattccaatcatcagcaggcatctgtaactccagccggcgtccctccaggtatgcaaatgccatctgcccttacatgagggaaatggacagcagcggaagttaccaagggcccacaaggtgtcagcatctgggacagaaatgaagttccctccctatcaccaacttctcttttaaagaaccactcaaaccctgccaagcttgtacaagaggagtaaataacaaaatgacacagatgacccataaaggatgtatatttgcttaaatgaaataatagagtacttcacaagtgcctggtccatgtaagacttttgttttgttttgttttaatggctatttcaatataacactaatttaatagatatagtttaaatataagggactgtaaatagagtcttcaaaatagtacatcaaaaatttccttcatgatgaaatagatggcctactatgcttatccagagttattcttgcaaatttctacctgtagatattgttcggcaaataggcaagttcaattgattgttgattttaaataaaagttctaactgagaaaaaaaaagtaagcccataagagaaaccagtttcaaaaggccacatcctgtggattctccttatttgacattcttgaaaagataaagctatggtgatgaaaaacagatccctggctgccaggggttagagatggaaggaggcggttcgatgcggtaaaggcacagttccactgattatagtggtggttacacgcctccatacatttgtgaaaattcatagacctacacaccaaatttttttaaaaagtcaattttattttatgattacctaaaaaataaaaatgtttacaaggcccatgaattgggttgtctctaaaagatgacttttcttcatatttcttccaaattggttcatatttagagcactattgattatctaacaaaattttaaatggaaatagttgcagtggagattaaatgaaataacatattaaactgcttttgaaataaaaagggcatggaggatgtcatagaagtagcggtgcttgcagtaagaagtcagatcagactttacaaccttgttaaatgagggactgaaggcctggggtccccaccactccttcccgtgagccagtgcccttcgtactccactttccttatgtgtgaaaaggggcacctgaggaagggttgtatcttcaagcactttaatcccattacccaattattcacgtgcacagacccataattgggagttagatgttttccttcagtgctcaaaatagagcaagtttgtccctcaaaaccaaaagtactcaggtcatgaatgaaggctgaagaaattctgatctggcgggaaattccactttctgacaaccctgatggtacctctgaaaaaaacaaacacaatgactgcttttgaagggcaggagacagaaagacttaaccagtacttttcaaagggaggaaaattctgtgtcatcgtaagcttgaataaacccagtgctgtgaattgccaaaggagaggttaactgttttgaaagctgtggcatttttctcatcagtgtctcatgaggctggccaggaggggcagttggaaagaaggctcggagatttgatattcaggaagtccaccagacatgcagcattcttgacaagatgcctttcacctaatgtcatattagcaattcagacagaaacccaggaaagttagcacacacatatgccccacgctacacatgagccctcctcccaaaccacagcttcccgtgcctctcttccccatgaatttagtaccagcctccaagggtttctgccttcctttctgcaagtcaattgaagtaacttccagaaatgccttaattacaggccagtatcactgtcattagaggtttaaataaaaagtccccggattctaacctgctgagatttcttgtatgaaatgtacttacggaactttgataaagtaccagtcaactctaacacttaaatgggaaaaactgttgcagctcaaaattcaactctcatgcaaaactccagggatgaggcagcaaaggtaccacctcagcaagaagaaaaaggaagagagaaaaaagaaaaacaggtactccataaattacccacataaatcagtttaggcagactacaattttttttaacacagaaaacgcttaaaggaaaattcacagaaaatccatgattactcctttagcagggcgaaatgtcccaataagaaggagatgtattaatgggtggccaaccacctcttttgctccagtcgccttccgtggagaataatcaacagaaggaaatctaaaaatcaacatagagaggctgcggtgagctgcttcatgggtcctgggatagggggcatctgaactatttcccagcgtctgggggaaaaggagtgaacattttcaagtgcctcatatgtgctggtgctttacttgggctgtttatttcattttttcatgttctttcaaggtgttcttaattctgccttacagaccagtggaggctccagtatgttagataaattccccaggggcaccagttaaggatcactaggaatgcggaattcccctccagctcagctctgccctgaacatcttgatgccaggagtaaattcagggctctgagaagggtcccaaatgttacaaactttaaaattgaactaagggatgaaagtttaaaattgtcttcaaaggaattcctcaagtaacataaccctgcacatataaaagtgtcagcaggctcagattaaagggctcatgaaagagggttatttccagagataagaatccttcatcctcctctgggcagggcagcagagatagaaggcacagccggctgagaccccgccgggcctcaggaagtctccactgttaaacccagcctgcaaagcccttccctcttagggatccactccattagagttgacctgaaagctgactcctttggagtggtgcgttccattaattcatccatccaacaattgcttgctgaggacctagtatgtgtcaagacagctggagatagagcaaggcaccagtcatttcagtgttttcagatgaattccccacctattgcctgctctattcttaatcacaggggcggcccccactatgttttctggcactgttgccaactggatcatactggatttggccagtggaagcactgggcaaagcccagagggcggaaggaagggagaagttggaacctgtccctctcctgtctgttcttcagccatgattaggtctcctccatgataccacctcctctttttgtccttccaggccccagctcctttctcttgtcaacctccgggttgccctacagtgacctacttagccattccactcttctgatgctagggtaatagttccctacattaaatatactctcttgagccactttgttttcctggctgggttctgacctctacaagcattgaatctgactaaccagatccctgccctcttagaacttacattccagtgggcaggaatacaataagcaagtaagcattcaaatacatgaataagaacagttcctgatcatgttaggattatgaaggaaattagcatcgaggtggcaggatttggggatggagagctatatcagctggtaaggggatatctctgctgagatctgaagaacgcaatggatctacctttgaaaggccaggagaagagcatggcaggcagagggaacagtaggtcaaaggtctcccaggaagaactagcttggtgtgcttcaagagcctccagaagccaatgtggccaatgcatctgagcaatgggggatgtgtcaggggccaatgccatgggaaggagtttggaacttacaattgatttcatttacatttaaaaagatcactttggccaatgtatagggaattttcctcattgtttataaagagagacccttaatgcctcaccctgtccaggcatatccccatcttgaaggtctaagagagagctacccctcctaatgagtttgcacaacaagaatgggggggacaaccatagctcctaaagcatggttctgagggagaaacggtggttcccttgatatcagctctaccatgttctgaggccatggtacagaagaggtaaccattcatgtgcatgacagccctgactctaaggggcattgtgggttcctttcttaaccattctggaaggttcctggtgaaaggactgatgcacatccacatagccttgcattccaaggtgatccactggaccgtctagacttttatctctggaccctgggagttgcagacactgtatcagaacctccaaccttccccttggcctgccagaaagctgaaagtttccatgcctctgctttccagctctttctctgctacatcagagagcccctttctcatgtcctcaaagtgacaaatgtatgctgccaagcaaggctgagggaaagaaggaaatagaaatgcagtccccatcatgcattctttcccaaaatgcgactaatctggcatttaggttgtttgctcctttaatcagaatgccattaagaaatctctgccgggtttctgtacacagtttttctctaatgaagcatcaaatctctttcacaaacaatagctgtgtcacatccaagcaccctggccccagccggtgtggctgcagtctctgctaaatgtgctgcctctttcaggtctgttcctcccagaatagcccgccactgcggtactcaaatcaaagtctcgacactgtctagctccagcaacgtggacagacaaaagaaatcagaggttttcaagaagacatagtgctgtgtccctagaatttgacagaatagcttggaatatgatgtttaatgaatagcctttctagtgaacatgtttgtcctggcttcaactctgggcccaggtttgcagtggctcacccaatgggtgtacttatcatccttgacttaacccccaactagtgagctatttcctggagggtggaccttgtcagaggcagaactataatgagatgtccccagagctattagtgaataacatggcagagccctgctgagcatggtgtttgaccaggcccaggtgccatggtctctaagcatatgttcatatatacatcttggaaggcaatgcagcaacaactatcattatttaaggtgcacataacctgggacccaaaaatgccattcataggagtttaccccatagatacactggcacatgtgtgcaaagaccaatgtaagaatgcatttgctgttacattgtttattacagcacaagattagaaacaatgttacaatcagggccaggcacagtgactcacgcctgtaatcccagcactttggaaggctgaggtgggcgggtcatctgaggtcaggagttcgaggccaggcttgccaacatggtgaaaccttgtctctactaaaaatacaaaaactagccaggcctggtgccacacgcctgtaatcccctctacttgggaggctgaagcaggagaatctcttgaacccaggaggtggaggttgcagtcagccgagattgtgccactgcactccagcctggacaacagagcaagactctgtctcaaaaaaaagaaaagaaacaatctattgataaggggctcccaattacatatatttggatacaccaatgcaaagtaaaaatatgttgtagctgtttttaaaggcaggtatataggtctgatgtgaatagatcattaagaaatagtgtgaggccgggtgtggtggctcaggactgtaatcccagcactttgggaagccaaggtgggcagatcacctgaggacaggagttcaagaccagcctggccaacatggtgaaaccctgtctctactaaaaatacaaaaattagccagcaaggtggtgcatgcctataatcccagctactccagaggctgaagcaggagaatcacttgaatcccggaggcagaggttgcagtgagccgagatcatgccactgcactctagcctggacaacaagagtgaaactcggtctcaaaaaaaaaaaagagagtagtgtgaaagtgcaccatcattttttaaatgggaaaattatacatagacacgcatatatgtgtgcacatacgcttgtatgtgcatagattctcactgaaagtgtacactagagattgttaataaacagttttcaggccgggcgcggtggctcacgcctgtaatcccagcactttgggaggccgaggcgggtggatcatgaggtcaggagatcgagaccattctggctaacaaggtgaaaccccgtctctactaaaaatacaaaaaattagccgggcgcggtggcgggcgcctgtagtcccagctactcgggaggctgaggcaggagaatggcgtgaacccgggaggcggagcttgcagtgagccgagattgcgccactgcagtccacagtccggcctgggcgacagagcgagactccgtctcaaaaaaaaaaaaaaaaaaaaaaaaaaaaaacagttttcagctctgggaaggaaaaatggggcattagaaactggggatgaagagatattttaaagtatatgatttcaaacaaattaacttttttttatttttacaagtacatacttaatctctttaaaagtaattttgtaaaagggcaaaatgcagtgctccctgaggctctggtaaataaaccgagaaatcactgactggaagttgtggtagataaaataatgaccctcaaagatgccagtatcttaatcccaagaacccatgaatatgtgaccttacatggcaaaaggggtttgctggtgtgattaagttaaggatcttgaaatggggagattgtccttgattatccaggtgggcccactgtaatcactaggtctttataaaagggaggtagagggtcagaatcagagaagaagatgtgccaacagaagcaaaagtaagaagtgatgtgaggaaggggccatggaccaaaaagtgtaggcagtctctagaggctagaaaaggaaaggaagcagagtcttcccagagccagcctccagtcctgctgacactttgactttagcccagtgagatgatttgggattctgaccccccaaatctgtaagacaataaatttatattgttgcagccactaagtttgtggtaatttgttacagcagcaacagggaactaatatggaggtaaaccttttaaaaccaactaattcatgtgtcagaagggggaccatcagccatgcttacccaagtggaggctcatcacccttgattgatcattctgctggggacaggacagattttccataacactatcagttccaatgaaagctgatgtatgaaaaacatctcccttagttggtctgatggtagcagtctcctggatagaactgccatcccagacccacactggggtgagcttggcagccatctggcctcatcactatgctcttcacagaatgctatctccactctagcatgtgtctgtctcatttatcaagctgatgacatggcggtatgaaaaaaacagatgagaggtcctacctgccgatctgctccaaagagattataaaatctaagaggaatgcctgggtgtgtgggcgggggggcggtgggggaatgtagagaagaacaaagttccttctggagctttgggaaagccgtttgtgagcctggacttcccccagcctttgaatcattaatctggttgtacccaagacatccaacagggtgcagacttgcctcattgctccagaagctgagaccacccccgtaacttgtgaggacggaggtcctaccccctgtgaagaaggctgagacacagagaaaactgagagattaaatttataatcataaccttcctctggcttccagagaactacaaaacaaggacacattcccactgtctcttgtcccaagagtagagccaaaccaaatagcctcaccatacccaacattatgcaacttgaagcccaatcaattggctccacccacatttcatctacaggacattgttgccaaacttcttaggtatcttcaatatgagatttttaaagagctaaagatataacagaaaaagcctcaatggaaattttacggctattttcttttgcggctcagggaacataagcttttatcattttccttcattcaagtaacagctttgccctagctccatggttgtcatgcatggtccatggtgctgctttgatgatttataaccagctgagtcatcatctcactaagtcaaaagagattagtatgtgaacctatttggtaaactgtaaggcactacacacgtctggtggcaaggcttgtaaagctctaaatacacgcataattaatgtgactactccccaagacagatggtataaaggagacgacctctacctatgaaaggaaggggagaagaaaagatcaaaaccacctccttctccagccaagctatgtttgctctcccattcctctccttactcccaagatctaaacatgacaggagtggagaagggaagatgtctttaatttcctggttaatttctcctgcctggattccaagatggagacccaaagggagacctgtgtgataactggccctcaaaggagtgcacacagtagacccaggagcaacagcaaaagttgctgactaaacctggggacagcaattggtatccatccctcaggcatttactttgccttttcctcaccagtcaacttcaaggcccttgaagttgtcaagaaactggcaacctagacatttatatccaaaccagatccaagaattgtatcgtaagaatggaacaataattgaaccttgtgtcccctgctaaaccagagagagcttgtcaacaaaaaggactgagagaagaatcctggggaacgggctaatgagaaaggctacctgaaccttcagaaatacctggggagcttattttatttatttatttattttgagacagaggttcactctcaacgcccaggctggagtgcagtggtgtgatctcggctcactgcaacctccacctcctgggctcaagcgattctcctgcctcagcgtcccgagtagctgggctacaggcattcaccaccacgctcagctaatctttgtacttttagcagagacagggtttcgtcatgttggccaggctcgtctcgaactcctgacctcaggtgatccacccaacttggcctcccaaagtgctgggattacaggtgtgagccaccgtgcccaaacttgcagcttattttaaatggatgtctgggctgcactgcagatctatggtgataaggcaggagggggcaccctaactgaaaaaaaaatctccagatgattccaatacccagctgagtttaggtcctaccacattaggtgacctcccaaaggtcccctcatttgatttccctcccacttccacactgaacaccagcaagtccagagagaaatggccctcggcatccagcagagttctttccagtgcccgccagagtgatggccaccaaaccttcctccagactggctcccattgtgtgcagggcaggcaggacagtctgtaagagatcatcactgtggacaatcggggaaggagctggcctgggcagagactgccctgaacattcatgggacctgcgccccagagcatcagatgggcctctctgctgaaggaataataaatatgtcttttgaacaactgattttgttgttgttgtgtttccacacatatatgttcaccagtgctggtttcatagtagttcagtcgtactgcacaggtgagctagggggctttcttaaaagccagaagactatttaaatttagatttgcatgctgaaatggagcaacttttggcatgtgataaagatggggaaagttgaagaccacaccctgcaacgccctccctgacttactactaccacccatcatctcccattaaaagaaacaaaacaaaacatcattctaatgccagttaaacgttgcatgtattgattaagccttccctcccatctgaaattctccctaaggagtaacattttaaagcttgcagtgagggtcctaaggaggctgctgctttgacagcctgcatgagcagcagaagggaccttgctccctaggccagcatctggatttcccatctggcccacgcctgcagctgcgtaaccctctggcccccctccaacgtgcctcaaaatgttatttcacattttgggtccaaatggacactttctgagaagtcggtgtaacctatcaagctttggaaacaagtttaagttgtttttgtactttccattacccaggttgttctggaacgcagctctaagaggttcagcttgccaccacgtcaaggaatttgagaaaagggaaaaacaaagagggggaaagcctgcacaagaagaccgagggtctggaaatcagaacctggtgttttccaaaggtcctgttcagcctacactccccttttccatttctgccatgctgttggggcaaactggcatgggaagtaggggcttttgtcctaaaggcatagcatcaaggtccccagagctacaaggctctccaattccttctccctggtcccgtatcatcagacaaacccaatagagtgattctctaacatgctgtgctcagaaaggtgaaagaaccaccaggcgtggtagggaggctgtgtccactgttcagcccagtcagtgtggcttctctccctgggctgggctccatcagctcatgctgagcctctgtggcattagaaaaaataatcccttggcctcagggcctgctaagggacttcaagccagatttcattcccattcacttcctaagccaggtaccctgtgcagggcatgagagccagtggacaggacgcccctgcacttgggagattcggtaccctgattaagggaaagccacctccctggctctggggaaggtaagagacctgagaaagcaacagccttggatctcactacattttgtgggctacttctgaaaaccacactttgaattccagtcccatcactgaccagctctggactacctgtgactttgaataagctattcaatctgtgcctcaactccctcccccatacaatggggaggatgttagcatctatctcacaggtagagttgttgtgaggactaggcagagtaatccatataaggcactctatcattatgttgttagatcagtttcaagaagcacattttccaacataaaatgatttgtgaaactgagatcttataatcagtccatatgttaatacatacttaatagagttttctcccaccgcatcctccaaaacagcaggtattaaatcaatggtgcatctttctcatcaacgtatttgagttaagaaaatatggtcttttaattaccatttcatgcatagtaatggctgcaatgttaaagactcacttcttcctgggtaattttgcagcatagtctctaccagcacccctggggatgtaggtgcctaccaagccaccatctcctttcttctccagcccctctggactccttcaggtgctctcaaacctaaactcataaaatccttgccagatccttagggagcatccaacaagtggttctgagcccgagctgctcacagaaatcctagggcactcgctggccccacaggttctgattccattaatggaagtgaggcccgggcatcagcatttttaaaagctccccagatggttgtaacatgcagtggaatcaagaactctggctccagtctgtccccacctccatctgatgcctgaaatcccctcaatccctgcagctaatgagtagctggccagcctcttccaggagaatcaaaacttcactgacttaggttgcagaacaccataataaagcagaggttcttcctcaggcagtgtctttgttgttctgagataaagaaaaagaccttgaaggcaattctaagctgggaaatgagaaaacctgcctcaaatggagtccttcttcccagccatcttaagctcagatacctggaatttatttattttgaactttgtagaaatcttttgacttacaaatgacctaattctctaaactagctatgctgagaatgcaagataacttttatgctggcttgattccataagaaatagtgactcataaggatcatcatcagaaataaatttctcaaaacttttaagtaaatctgtttctaggtaaacttgatggacttttgaaggattatatttcccccttctttttcctcttgcatccataccaagctcttttctttatggcagaccttgtttcctctccatcttctactttcatagatacagtccatcaaatcatacacatgactcatttcaccaaccacgaagattctaccatgcactggagaattagtgagttggcttcaactgcacttcaattgacgccccggaggtgggtaagcatacatttccacatgtatgcagatagaaaaatatctgattgggcactaaatgtttaattctctgagaaattggcaatccagtgagaaagctacgctaggcatcctagatgcttttagatcacagtaatggaagcatctcacaacagcctaatgttttcaacccatcagaaagcagagtcccagagagcctatggggactcaaaacaaacccaactaaagccaggtggagtgacctctcatctcagactccaaggcttgggagtaggaatgggcaaagtggagacaagctgccaaatattaggggtgcgccatgtcctacatgttggatgggccctttacacatgccatctcctttaacttccttctcacagtaagtggggagacagagattagaatcaggctcgcataaggtcacaaagatagtaaacagcagacctaggacttagccctggtccctctgatttccaagcttccttccaccaaatggtggagtaacttgctcccaatccatggatccagacctgggaaaggggctgcttctctgagctccaggagctattggttgagaatcctctcttttttgcatccctgggttgctgcccacccccatactgctccttaagcacttaattaatggtgtcctgtggccagtcctgatgatgcagtttttcttggtcactctgtgggccacagacttgcagctgccaattccccctacaagcattgctcgggtccaggcccactgtaggagacaccctgactactccggtgcagatctcacagctaccatgactgtttgttcagcccccacattctccagggtcccaatttcttgtcccacattcaaaaagaatgaggttatgctgccagccagtgggtgagcaaggtgaaaagttttattaactgatgaaacagctgtcagcagagaggggacgtgagaattgtctaccacccaaagtcaggtagtctctgtgtcccagtgtggctgagtccagggtttttatgggctcagaaaggggatggatactgattggtctgtgagtatgcaaaaaaaggcaacagtgtaaaaaccaattggggaagggtgggtataggtgaagaggtgggggttaatcagaggaaagcatgccaaatgggaagagaggttctcaatccagtctgtggatttatccaagacttgtagcttggctttcagactttaaactggctttggtttgcaggggggggtttcactggggactcacctgtgtttgcctagggatttgtctacctcctgctgtatcactgagttcaaatccccattctaccacttgccagctgtgtagccttgggaaaattactaacctctctggcctcagtttctccatgtttgaggtggaaataataatacctactctgctctgaacactaaatgagctcatttacgatggcatttagaagagtggacagaagtgaatgttccttctcccattattcatattgactccaccagtactgtctcacagggtcactgtatcatggcatccatctttccatgggtacatgtcttgtatagtccttaggggaaggtcttgttcttctctcctctcctcagggtccactcacttatgcattatctcataaaggatactgaagcccattgagggcatttcctaatctgaaggggcctctgatagacttctactacttaagtctcccatcactttcccacccttaaccccattctagaaaaacccataggtaaacagagtatacctgattttctaatacccattgaatattttatatttgtttttatactttgcaatgaagaatgtttcagtaaatttcctaaaggaaacaaaaaactcatagatgatataagtaagccatgtcacccctgggcttcctccaccttccactgtgtactacaggcagcacagtccctcccatgctgtgctctgaccttgcctgaccttgccaccctgagtgtgacctgcagaccagcagcatcagcatacccaggaagtcagttagaaatgtgaattcttgggccacagacttaaagactcagaatttgagcccatggattcttgcttcagggtctgtgctcttcgccaccacactacactgtttctctttatcagcaatgaaattgagaacagactcattgcaagacgctcattgtcagctccgtcctctactgacttcaaaacatcatcagcttttcacattaaatttgtttatcacccgtctcagatactatctttgatatcagaggtaagactggcattgtggacagatgttttcatgccttgacccaaaagggtaacaaacatggatactgcaggccaacacgaaggaattgtgttgatgggccataagaaccacaatgggtcccttaaaccacacctcagctacctgatttcctgcacatagggccagaaatatactaaggggaaaatggtagaagggaaaatgagaacaagaaagaatgagataccctgcaggtgtcttcctctactagggaggcccctgagaaatgactgaatgtttttagcaaaagattagaagaataatattatcttgccatctgttattgcttatagagagccaataagtgtgtcttagagattctgagttccagggatgatcccactcaggttccctgacccactgtgagtcatacctccatagcagaggggcccctaaccccaggatttccatgccttctgcaagctggtcttttagatttcatcagcagtcagtcctgtggccatggaacggggaatgatcgatgacagcccactgaaggaggaccttcttcttgtttgcttggttctggggaatgcatctcctaggcaggagcaacacgtgccataatggtaaaataatttgggaaaaaatggcaaaaaatatttgcttttgccttaaatctaccaaaagtggatcacaggttgaaaactgcctgatcttggtcgttcgaagcccctgagtggctcagtatttgaactcagtgcagccctgagcaaccaattaatatttgcccagtgggcaggattgacttcagttacctaaagatgttactactgctcttctggttgcccagagattcccacaccccgtgtgcagcacagatccagcagagactccttgccaaaggccattgcggtccaagaccccaaagaggaaggctccagaggtgactgctgcttgggaagtcaatatcggacatgagtgctagaaccaaggtaatgcttcccagacttcactatgcccaccagagacctggagagcttgttaaaattttgactgctgggccaagagagctggggctgaacctgagaatctacatttctaacaagtctccaggggatggtggtcgatggaccacactgagaagcaccatgtctgaaaatcttttgagccaaacattttatttcaccaatgaagaatttgggaccagagaggctaactagtatgtccaaaatcacccagcacatcagtgacagggttgggaccaggtgccctgactcctagtttccactgtgttcccactctatcagcttaccttaaaacagcaatcgtcatagtcattttatgaactataactcattttgagtaccaaatgcttttcctatttcctcttctttatctttataatcaccctttgaggttgagggcatgggtctcaacttatagagaaagaaacgaaggttgaaaaaagtaacaacaacaatgaaaattggctctagatcacaagccaaggagtagagctggattctacccagttctctctgaccttgtgctgttcctctttacatctcttcaggttctcagaggggagctctctctaccaaaggtttaatgcaagacccacatagtcacctagcttacggaaaggacaggcctgaagactagggtaaaattaagatgataaaacagtgaacaaatattttaaaactatgtccaggaggaaagctagaggaaagagccctaagccccagctgctccataggctacctgtcattctctttccaaaacctttcaggggtttaagacctagaaccacgtgtctgacaccacagccctgtaaattctgtccccaagagtcctgaggctctgcgcaaacaaaattaatagcctgcaaactctaaatgggtgattacaatctataaagcagcccataaaatgacatcatggggattcatatttattttctcccactgatttccactataaatttgcttggtttatgagtagaaacagtttcttctgctacgtgcctgggcataaagctcacctaaagatggaaacctaaagatgtctggggctcacttcacccccagtggtgctctggtcaatgggacacacagaagaaacctcccaaggaagctctggaaaccccaaagcagccactgcctctacaaacatgccctgagagcctgctgagctgcaggcttctgtgctaggtcttgagcagtagccaacaaaatgggggtggtctctgccctcagggaccttgcaagggtccctgaaagggaaagaggagacagacactaaacagaaaactacatggataacacatgggggttcattagggaatgcaaagggaaagtacagcaagctatgagctgtggaacaggagcagctaacctgatctggtaggggtgatgcccaagaaggatgagtaagtggaggctaagcaaaaggtggggaaagggagaagaggagagacattccaagtagagggatccacatgggtagagcccagctgtttgctgctgttgcagttgagccacatgagtatcaaataaagaatgacaaaaattctgggtcagacaacacatataggatataataagattaggttttcttccaagtgcaatagaaataaatgaagagttttaagaaaagaattaacatgatcagaaaaccatcttagaaagattctaccagccgcagttagaagaatggatttgacagagagggggtgtttaggagggaatgtcagcagatttgtaggacactattgcagttgtctacacaagaagtgatggtggcctgaactaggtaagaataaatgggccacagtgctatctaggaggtaggaccgattagggctgtcagacccagcttacgcaaaaagggcagggcatttaggaggtgcacagtagataatggtgatcactgacctactggcacttgcaaatgctttgaatccaatctcattagccaaggtcaatacctggaagccactcagaagccagtattggtacgaggtcaagtgaccacctcaccagtgcaacatagcacacgcagctcaagtcatccccagaccagttgacactctcaacttgcaaaagaacacatgaggtagaatccctttcctttaatttaacccaagctctactactgcctcagttcaaaggtcatcaattgcaagatcagcagaaggggcatggctccctgaatcccaacaaggctacaagggttttggttttacatagctcatccaaagccagtctcttctggccttcagaaatttctccctcttccaagctccaagggcatttatatcatccctgtacatgcagacacagtccccaacttacaatggctcaacttatgattttttgagtttacaatactccaaaagcaatgggtattcagaagaagctgtacttcaagtacccatacgaccattttgtttcctactttaagtgcaatattcaataaattacatgcaatgttcaacgcttatcacaaaataggtgttgggttagataattttgcccaactatgagctaatgtaagtgttctgagcacatttaaggtttaaggctaggctaagccatgatgttcagtagatggagtctcgttccgtcacccaggctggagtgcagtggcgcgatcttggctcactgcaagctccacctcccaggttcaggccattctcctgcctcagcctcccaagtagctgggactacaggcgcgcaccaccacgcccagctaatttttttgtatttttttagtagagacggggtttcaccgtgttagccaggatggtctcgatctcctgacctcgtgatccaccctcctcggcctcccaaagggctgggattacaggcatgagccactgcacccggcctaaacacatttttaacttatgatattttcaacttatgatgggctatcaggatgtaacaccattgtacgttgagaagcatctcattctaccttgcttagattcaatttggaatcacaacttaggctgccattgttgtctaataattgcatgttcattaacctgttttccaaaaagactttaagccaccttaagataagcacagcatacccagcgacaaggtgctgtagatgagcacctactaaatatcagagaaagaagtgaattgactgggcccagaagagaggaaaatgccagtctggtgatgccagaccaacagagaggagtgagtgggaggacaggctcagcactgaactatctagagttgcccttgagtcctagccaagatggctgtcactccccaggtgcccagagatggtggctttcttgagcaattgatctgaaaataggtcccctaagcagaccttgtcactgaagttcacacactgcccaagctgagtgccatgctgagcatagcccagatgaaatgattgctcatcttgagggcaacatcccagacaaaccagtcccttttatgtctcactcactatggagggaaagcccctgctctcttgccctcaaacattagatgggcttacagaaatgcattcccatttcataatgcctgctgtgattccaggtaattcctctaagtgcactattaaatcccagcagctgttccagataacagcaaagtcgacaattccagctgccgccttgtcaggaaatgaagcaaagcagctgtaagtttcctaacactgagacatgaccaaaatggcagcatgagggatcactcatgtgcaggtttctccaccgccatgcagataatgtgtgtccaccatcacacatacattacctgccctgagtctactctgatgtctgaggctggaggactcaaaactgtgggccatattcccctgagatacccagctacagttatctttgagatcctcatgagaaagaatcccaaattaacactgagcccctacccataaagcatgctcaaggtgctggagaattgcttaaggccacacagctaaaatggccgccaagtcaggatttgaactctgatcctgtgagctccaaagcatcaagcttctctatccttcactgttccctactgctcttaaagccctgtatttcccttacccaaaggagcccggccatctcaacagtattttcgccatctgggccaaccacgtgccggcagagtgcataaataccacttttgtgaccaaaactgtatttcctcggttgatccaacatcagcatctttgcacctgcaactttccttaagaagaatttttccatgatgtgatgacagaatttgcagccagcaaaggggatcatagacatacatgtacacacgagcccacaaccatctacttcaaagcctcccagcctgaagtacgctctccagatgtctctatataccaggtgcttcgaggctggccagcatctccctgacagcagaacaagttagtataaggaatttctatttaaaagccaagttctacaaaagctaagccaagcaaggttctaataaacagtaaaaccgccacgttgtgacacatggcttaaagttggtcactcacctaggtgggtcagaaagacaccaatgcttttcattttccccagcacctcaaccctggttagtgctagggtgggatccctggtgggagactccacccacactgaacctggctggcttcacttttccagactggtgtgttctccaggcaaatatatattttccccctacccacctccctccgtgtgactcagcaagcaagtgctgggtaggaggagtgctggtagggtgggggacgactctgttctcattccaggctcaaggaacagcctcagtcatggacaagaagtataggcagagagtcaggagaccaaggctctagacctgttgttgatgactaagatggcctgggatgagtcccacagcctctctggtctcagttcctcatctataatttgcaggttgaatgatacctgaggctctgtgattgcttgagtcagccaacagctcaatcagccacacagaaacaacctctcctcttctctcttccagcctggataaagcttgtggggcatgagatttatgggtttggtgctgaattgcatcatgtatgaggcagaatttgagttggattttcatgggttgggaggatttgtaaaggcattgaaggcatggggggacatgagtggcataaacaaagaagtggagtcaggaatgtgcttagcgtctttgaaggaaccactagggatgataatttagacagcgtgcactagtacaactaaaccagtctctcaaatattgaaaccttttgtaccggctggtaaacagccaatggccttgacttaggagtgccccctcagctgcccctgctgctgcagtgcctatcccccatcccaaccccatgatccaacaaccaaagggttaatttctgagatctcgatccaaaaggtgcccataccatggtgatcctagtcagcccaaagccacaccacacatctaacaagcattcctgtgtgccagataccatcttaggcacattaacatatgttactttttctccccttcacactaacctcttcagattaaggaactgaggcttggagcagttatgtgacttgttcaaggatgcaataacagtatttgaacaaagaccattaaatccaagtccagagctcacttcttaaaaccccagctgcctctgagcagccttggcccgcagacagacgagctttggaggaaataggaggaatttctccctgctatggagattgttttaagatcatgaattgttagcggaacaagttgtcgtggcagcttatgaaatcaccctcttctgcgatttttataagtaagaggggttagaataggcccagagacagagggagagatgaaatgacctaataaaaccctttccaaccctggaacacttcagccccacatgaacagaaaagtctatttattttcaaagccccattttaactcctgaagtacttaggagacttaaatatgtctgaaggcaaaacaagttccctctttttcctcttttcctaccactccaactcttcattgcagattttcttcctgcaggtctgacaaacaccatttttggccacagctgctgtcagttcaaaagtttggctctggggtctgaagaccaaagtctgtccaaggctgatcaccttctgagaaagactcttaaattctgtgaagagtctccagcagaggagaaattggtttaaaaaagcaagaagaatcaccacaatgcatgcccactccacattaccaagcctgcacaactcatgttaggggatgtctgctgctcctccagctttctcccctggcaaatacagtggtggtccctgagtccccattagggcccaacagcaggaccagtagcagcccctgtcagagaaaccacagccagttggggagagcgaactcatactataggcttgtttccatggcaacagatgctccctcctccctgcttctcggcaccagggaaggacaaggaaacccatgagaagacagtggcaactagggggaggaggaatggcagcaagtcccctttctttgaaacccaggcagctgctgccccacatgttgatggttacagctctcagtgaccttggacaagttatgccccagctctgaactttgtttttatcatttaaaaaaataaataaataaaaaagatcaagagattgagagagagagcaagcgagctgggccagagatgatccaataaagctatttcagctctgatgtcccagaatccaatgatttgtctaacctggccagtgattgggaatgggttcacctcttcttgcagccctctgcaggagcatgacattccgcaaggctggagtggatctgcctctcagggacctaagccttatccattcccccagtcatgctgcctccctcacaatggtctgctgtcatttctctgaaatcatctcaggagatctatcccatgctttcctaagggtgcacgggtttcctggggctcacacaagccatccaacatgacaggtgagccagaatgtcatggcaccgcacccagccacttgcctcccacctcactgatgttgttggattcaacctgcaattcagatgcacacagcccactaggcgctagcctgctatgactgcgcaagcgaaggaactccagggagaacacccagaaaggtcattttgtttggtatgaagagtgctagggtgaggtgaggggcagggagtgggacagaagcttcccaggaaaaggggaaaccatgcacagcagccaggagccatggactccaataccccaaggtttggaaaagtacttgtaattttggctgattgaccaaaagtggaaagaggagtgtagcatgagagaagggaagagaggaaggacagaaaagtggacaaagaattccaggagatggccggccgcggtggctcatgcccgtaatcccagcactttgggaggccaaggcaggcggatcacctgaggtcaggagttcgagaccagcctggccaacatggtgaaaccccatctctactaaagatacaaaaaataactgggaatggtgatgcacatttgtaatcccagctacttgggaggctgagagaggaggactgcttgaacttgggagacggagattgtagtgagctgaaatcgtgacactgcactccagtttgggcaacagagcgagattctgtctcaaaaaataaagaatgccaagaggcataaaaacacggcaatgcttccagggctggatttaggggagaaaagggagtactcattgttggaagtacaagccacatgcccagtgctagcttttatgggagtagcaggggatagctgagggccaggttagtcactgagccctccacatgagcctggtgggggtgtacttgtttccattgtatgcatgaagaagcagcaactcagaactacagcatgatttcacctagtaggtcagctaccccttttctggagtatacaatcttgctgggggacaaaataaacaatcatggacaaattaccacatgatttaaaaattgacacacggccactctcacaaccatcctcagaaatccagaagttcagggaggaacaacaacaaattggacttctgaggacttcctgttgccagtggactttaagaaacgttcagcctctccagcgcaattcacccctaacctatcagactccgcgttggtctgtgatggctcatctctggctcggaaatggttaaacagttcatttctgtgcttgaatcaggagcttccttaaacgctagcataaagctggtctacacataagaaatctgattagctcccagcattgggcaatcccaattattatgccctgcaagttgctctgcaggattagcggtctgcggaagaaaggaatcaatatacaacagtaattagggctcctgatgccggtaagaggagcacttctcttccccttaagccactcacgacagagtccatgaggggacagggccttcacagcactgccagtctctgttttctagcatatgttcattttgactttggtttttatttactgaaggatgtgaaattctctgctactgggccaagactttagggctacatacgtcacccaagaacagcgaacaggatgtgtcatgcatgggaccttccttccaaggaaactcagggaaagcagatgctaggatcctggcaaccccaggaaacctaatcagtgtccctgtaaccaagagctctttgagaacaggggctgtgtcttatttaccttatatcaatgtggcctagcacagtacctggcacatggtaagtaatgaacgggatggatgaggaagtgaatcaatgagtaagtgaattaataacacatggttttcagtttgtcaaaaactttatctgtgagcctgctgtgcacagaattttgtaccctaatactgtagtagcaatttacattggactcacaggatttgggggttaaagggaatttgaatataacccaatctggtatttttaaaatcacaggttgcaacctattagtggaccatgagatcagtttcatgagtcctgaccgtcattttataaatgaaatgagaatggaatgaaatgaagtggagtggagtgggatggaatgagatggaactagcaggaaataatagaatattccagaatagaaactatcaaagtacatcacatgtagtaaaggtgagtacaggaaaattaggcttgtacttgcagggcatgagtgtgtgtctattgggtgtacagtgtcttaaggccaaaagccactgatgaatctaaccattcatccagtgattttcactgccctcagaggccacatcagggacaaataattttcctttttgatcccctcttgttacaggaaatgaatttcatccagaagcagcctgtttcacttacagactgtctggctgcaggaattagggcaaatcagagatgttatagaaagaaaaagaaaatgtttcctagatcaaaacacccatctaagtgctggggccatagagatgagatcgattccattttccacatgacaaacattcaaagattttagaatgtcaattgcgcccctgctgaatggcttggagaagagcaggaatagttctagttatcctaacaattgctcctaagatgttgctttgtacctgctcgttatccatcttgattgtgtttatgtaagttccagcccattcatgacccctggtgtgtggcatgaagaccatcacatttgagtctggtctgaagcttgtctgggtgatggctgaggtgaacccatgttagctcctggtgctcaccaactctcttcctaaaagctctcacattatctgttcaaaagcctgcatccacctagcagggtaatttcatcatccctgccctctcgtctgtgaataaacagcttgaactaatagtatttttcaaatgtttttgaccacaaccctcaggaagaaatgtactttacaacatggttcagaagacaccaccacacccccaacacacacacacacacacacacacacacacacacacacacacacgaagcaatgtttacctttactatatataatgggatgtactatgatgttttattctattctgcttcatttcttatgatgttggtgatgacccattaaatagatttcacaagctactgatggaccatgacccacagtgacactgaactagatagtacctaataatctgaaaaggcagggaagggcatctgggaagaatttcacaccaagcccatttcttttcattatgtttatttagccatgtgcctacgtttggttgtgtgtaaaggaagacaatggcttagtgagctgcagccaggctgttttggggactcacaaaggaatggtcacagtttcctgcctgtctcttattgccccccaggcaagctcattgagaaaagacagtgtgagtctcgtacagagcatgctgataactattacagatacgtgattattctcggttctgttgatgataacaacatagctgccatcttgtgtttgtttcctcttaggattagaaagcaaaagcaatctgaagattgaaagtcagaagcaaagttagaatggtgatttttttcccccaacccaacttggaagaatttgtctttggagaaccaacctaatcaaataaagtagcatcaatttactggagacataatccaacttgcataattgtcctggctggtttacaccacagctgttcatatgacatggttcattaaataataaagtcttcatcaggctctcctgcactgggctgcaattcttttcccccacaccaccaaagaagtgctgcctttattagaatgcagtgccacccattggcagtgggataatcaggggatttgtttttatgtgacattctattaaccaaacatcataaactgcatcaagtaaaagccactgcattttccccagtggaggatcccatcaccacataatcattctagactgtgggttctctgtgggcagggaccacatcccttcatctttatattcccagtgctaagcaaagtactcagcattggtgggcgcaagataaacatctattgaattaagaggaaaatatctccagtgtgggattcagaagagcaatgcttagaaacctggaggctccctggttgcaatgagcatttagtgtcttgaatactgtgtccctttcctttctggtttattaattttccacttgactggaccaaattttccaagtccacgtgatagcagacaggactctcaaaatcccctctggccaacagaaggttcaacaacaccaattttgctgtcttcaagctcaggagccctgctgggcagcagggaacctgtgccaatctcagtcttcctaaagaatcccacagttaaaagaggccacctgaaaatgggctgctgagaggtaacgatgaccttggaaatgtcctcaggtttgggaagtcagcaatttggtttacaaagcatgaaaaggaagactcgttgtaaaatacagaagatttaccagcttaagtagtttagaccaactcaaacttgagcttgagcctgcacgggactctcctggagggattgttcaagcacagagggttggcttcaccctcagagtttctgattcaggaatctgcacctctaagatccaggtaacgctgctcctccaggcaccccactttgagaagcattggtttagcctgcttattacaagcaaggctctagagctggctatctatgctggaaccctgaacccaccacctcagccaataattttaggcaagtcatttaaactttcccatccccaagatgcaagtgtcaaaccaaagcaccaagaggatctttctcacgagattgttatgaaggtcaaaggaggacacccactgcttaggggtgtgcttggtaggtagaaagagcttaattaaagttaaccacataaaggaaagtagggatatggtctgggggaaagactgctggtcagagaagccagatatgcattctagctctagccctgcgaccctgacttgctgtgtgaccctggacaagtgacttctttctgggtcatgccctcattcataaaatggggacactggacattctataatggactgaaggtgccttggcgctagaagcttccaaagctccttgctcctgactctatcacacagcgtcacgtacctgtagtgccttcccaatcaccccctaccacttagactgccaactgccaggccccagcaggataactcaagactgccttgaagacattgtctggttccttggccttgaagggtctttccacttggccacaggtgaccacctgactcaccgaatgtagtctaaggaacccacttccacctgggaagtgcaacctgggatccttcttgctgaaaccctattgcactccaccaagattttgttcacgtttcatttgtagccagctccactcatgcctctcattgatattcttttgtggttacattccagactggaagataagggaattcattgaagtgtttagaagggacaagtgtggtttcatcgggagtgttatgctcagatgagtattggaggattagttggggagagaatccacactcgcagagggagatgaggttctgaaatttattatcatagcctggttgtggggaagggagcctcaggaggagggttggaagcccaaattcctaattgaagatgcgaagcccattttcatcttatatttttattagccccatagcagcccactgcactggctttctgctaacagccgatggcagggagaggatgcttgttggcacaaggccgctgtacatttcatttttgtcagatgctggcaaaatttcctcatcagggaagataaattcgaggtgatattaataaacctctgaatgcagcaatcagatctggctggcactcttaatgattccaccagcagtgagccatttccagcctgaggagcttagagattcacggttttgtttaaggcatcccaaaaactagaaattgtttgcttgactcctgggttgagcccgcatcttcaacctggatactcccaggtgccccaagtgaggcagtagtgatggaagagaggcatttacaaaataaagtcttgggtaaatgttactcactattgttttgtacccagaaagtgctaagtgtctcatactatctcgtgtaattaccataggctcagtgatggaggtactatttttaggtgaggtcactccaacttagaaaggttatcattaacaatattggcatcatcatattgcaatattgactgacactaagtgctttctatgtgactgagcttaggattttacctgcattttcacttttcatttgcacaacaagttatcaattaagcactgtgatcgccaatttacagagttgaaaatagaggcttagagaggttaaacgtgaggctcaagatcagactcaagatgcatagccagtgatggaatccatgtgtgttggattctgaagctcatgccgccatggactgtgcttgttacggctcacaccaccatggactctactgtggaggcacaaccagagggccccatgggtctccacttgtagaaggcggttcacctatcatcctaccttctagtatgaaagcagcttgcactcataggcaagcttacagaagggtgcagccccagctcttgacatagaaccaagcacctggtaggcaccctttcaatgtttgataaataaatgaattgatggtcagtccctactcacgtcctagaagatttgtgaaaggacagttgaaattagtctcctatgctgctgtccacctcttggtatcttggtggacctattcaccaagggccaaatgtccctaagcacaggtgagaagagttgaggaaggtttttgtatcctactctgagagcagttggagacttcgttccttggcttagaagtcaagattggatgcagaactaggcaagttgcttttctgagcaaagagagtgctggcccaccccacatcctcccctggctgctggcccgctgcaagccttggcacacaagagaaggaggcagaagtgcatttgtttattcattcacccacaaacatgcctcaagcaattgagcacctactgaggccagagtagttttgggctctgcggagaacatacatataaataagaaaccatccttgaccttgaggaatttataagctaggaggaaaaataacaggtacattaactcaggtgtcagctgtctctggcttctccagtgcctaggcccatgtatacagcatcttgttttgccctgaataactttcatcctgaaggttacacttttttgagcttctccctcttgtccctcatcccaccccatcaccaccccatgccattgctccagatacaagcaaaaaggaacaacacagactgttgaagatttcacaggtaaggcagaaaaggaatttaaatcacatatctcatggcaaatgctctaacagattttgagtttgccttagttccttccaggccaaagcacaaccaaggatttccttccctgaccttttcccacagagttccttgaggtagaaaggtggctccaagaagcccaagtccttcactcgccctccaaaagcctcaccttttcactagagcagtcttcaccccttgtagatgtcattaaggatattcacaaatactcctattacgtcctctttctgggcaattgtaggattgcactttctagtttcctaaagttaagtgtggctgagtgctgagtggtttgctctagccaatgtaacatgagccacatgatgcgtgacacttctggatggaagctcttagccagagcagttcaccactgcctcctgccaagacggtgctggaagcaaagaccaagaggaagtttccatcaatctggtttgctgagtgactctgatgaacagcctccaccctcctactggcctcctaccttcatgactgatatatactgtattgagcaagaaataaacctttcttgtgttatgccactgtgggggctgtctgttactgtagcagagcatggcctcacttgactgatactgccctcttcgaagcagaacaattctgctttgctctgacctacagtcagactttcacactaaaccaaggtgggcactcaccaaacaaaagattctccaggtaacacaatctacactctgtggatggaaagttatggcatcttttgatggtggagcattttccttgaggtcttaccccttactccatgagactcatcaacatattttttctaaacaaaatggtggagaagaattctggggaaagaattctggggaaagagtgtctggcacaaaagaaatatgctctgggaagtgcatgaaaaaggtaagtgtcaaaacagtggagacacaggaaatagtagcattaatttggacataagatgtcttcaagaagaaagtgaagtcccccaaactttcatgcaggtttctctgcaaggaaggaaggggctactcccctaagaacctaattggaatgtggctctgggtgccaaagctgaggctgagaccctaggcacactcaaagaaggaagagggagcttctgtggctctcggtgctctgcttctctgggtcaaacccttcttgccacacaggtgtgggagcctgagcaggccagtccactcctgccctcctttcagcccactccctgggccaggatgcacacaggtatgtattccccaatttgagccctgcctcacttcttcctcgttgttacctgccagcaccaccacacttgagaacagcagacacattgaactaaatatgatatgatgtaactctagcctaggagttacagaaaaaaacccaagcacatttctaaaatattcgagaatcctgtgttgaatgttaaagaaaccaaccacataggatctttataacacaccaaggcaggcactcacggcctgtcctgaacaaatccaaatcttttatccctggaacctacgtcattgtccacctccaggaatctgtgctgttgagctgacggctcctccactacaatgttctgctcattcaagactctgtcctcagtggttcatctccctcattcacatcccccatcaaaatatgtctgacttgtatcctattctttcagggcctttctaagaaaattccaaatgtactctagcagcttaatattttgccttccctaggcaagatgtttatatttaatcaaacaacttctgggaatgatgtatgtttagtgtaaagatatgcattactcagagtggaaattttcagtatgcaacagatcataatggacagaaggctctttgtggagtccgtggcttcaccctacatgccattctataatatataccacatgtgccaaataaatcccctaaatacagctccaaaaataacatatcagtatccattctcaagtaagcgacttctgccatacccagaggagaaagcatcagattaggtaactctgcttagtggtaacattctctaaagatgaaagcacttttcccactgacagaagcatggctccaagaagcccaagtcctgaggatattgtcagtaaaaccacacacacaggtcacagcttgttattaatcaattaattctcagcttgctttgtcccaagtcatccagcagacagaacaagaagagatttacaagctgtgtgcatttaaattaatatttttaaatggcatgagtgtgcaattaatactttcgaagaacatgtccacaccagatcaggcagtgtcggtttttttttcccctgtccatatgagtctatttttaattcctttcttggggaaagacaacagtcctagatttgttttgttttgtgtttttcttctgagactcaaaataaccatgttctttctgcttcagtaaatcattactgcagcttgaaagggttcctagaaagttctagttccattcagtttttaggaggaaaagcaacccaaacacgccaagaactagaagctttatccacaagggagtacgcttcaggatgataccaactgcattaatcaggatagacaaggttatgctgcagtaacaactaaaacctaaaattccaaaggcataacacttaaacatttacttctcactcaggaaaagtcactttgggtctggtgactctccaacacagcttcctttaaagagatgactcagggattcaagctgattgtatcttgtggtctacaatctcaatgcatggcctctgcaatcaccatgaaaggccaagggagagcatggagaagcaggtagaggcattttactgactcggactaggagggacatatattatttctgtgcacaatccactcaacaacaaggggccttggaagcatgggagagtccacaagtatttgatggttattaaatctctctttacacgggttatctcatagtgatgttaagagacttcatgatgttgttactctacttagaaactcttggatttcagcccttgaagaccatgctccaacttcatcatcaaatcctcaccagaaaagacaagaggatacagaacactgagcaactcacaagatgtgtgctgcagatgtgtttatcagaactcaaaagtttcctctcttttctctgtcctatgactattccaggagtgccagacagaactagttcttacgctctgcgaagaaaagagtggactggaggtgggtcacattgacattttggtaagagccctactccttagaaacagaatgaaagttgtcaatgaggggaagggagtaaggactggctaagagtagccatgctgggaagatttcattgcaaattttcctctacctgggagctggcagataaaccagatcattgttcccaaacactggaaggaggaccgactgttaaaaaaaaaatacccatgctggagcctaaatactctatgctagagcctggctattgacatattagcaagcatccctgggcaatccaatgcacagtcatattttgcagtcattgcactaaaggaatatccaaggtccccaccaacactaggatttcacaatttatgagcattttgaaagaatttacccctgaggattgacttattcagcatttaaatgggaactaagaccacgtaattgactgggaccaaaccaagatcagaattcataacctcacagctgttcctcatgtcaactctttctattctaacacactgccatcctcattttaaaaaagggaatgtggccttgatattcccatagattgctggatgcatacttccctgtcaccttccagtagggacacaggcattctattagctcagcagaatacagggctcccatccacatctgatggaaggcaaaggagatgaaactggtctccatgttgaggacagactggtacattaaagaagcaataggtcccctcatttgtacaccaagactcaagagttgaatctttcctttagtgacaagtggaagtccatggaagaatatttacaggcatggaagagtgagtttgaagtggggggcaaattctaaagagtaaagcctttaccaatggtaaactgtgccctttctatccatgccagcttgggaacccagttgagagtctgaaggagcaggacttagctttggacctgtgagatttcctctgtccccatcccaactgtgctcaggcccatcactttgcaggagcataattttatggcaagaggttcaccacatacctattgagctgcaagaggagtgatatcaatgtgcatatagttagggagagcaaagagtgctaatttagtaactgaagataagttacattgtatatgagatgtatttatatgcattttctacttctctctcctgcctcctgtatcactataaaccctagcagtcaagttccatgtcaggcctgttggatctttttcctgccatagagggagggacctgggagatggggagggattcagggatgacagtgttccagagtttgaactgggcataaagatatagaaccatccactggccaaggctgtcataggtaaatcctgcctggaggcaatttctagacagaacattctgtgagcttctaaatgatcctgaggtcggtatgcagatgctgacttaccagatctaatttgggaaaaagaagagggtaagaagttatatcttctgtggggattctggtggtaaggatgggcacagaagcaaaagagtgtttcctccttctccagaacatctggcttcattgcaagccactgtgggctactggagtagatggagagcagacagcatggcaccaactgaacactgtgcccactctccagacctgtccatgcaacccacagtagtggagtggccactccagggtcaggtagatatggcttccttcccagctctgccaattcccagctgaaaacattcttaaacttttccagtgtcctgtaaaatgggaaaaccagacctgtcccattgtatcctagtgagaattacatgatgtcatgccattaaagtacccagtaccaagcctggtacattataaacatccaagagcctaggtcttagcttcttcacctagcatgacacctctcccacccagcttactataccactgtgagatgataaaagcacacaagccctgtcaatgctaaaatatttatgaagctatagagaatatttttttaaattttcaacctgaatgtctgatttttttcttctgtatagagacagggtatcactatgctgcccagactggactcaaactcccataattctccaaccttagcctccagagtagctgggtgccaccatgcccagcttgtgtaagagcttttctgtcacgttctcagcattcctagatgcatgcatcaggacttcaattcatgcttcttcttgcctacaagtgggttctgttggtagctggaaagccaggctatggtggaggcaacagaaggaatacaggggtcccctttccaaacctccaagttatctgggttgggatactacaattttaagagtatcaaggaaggagctggagagaggaacttctggacactcagtatagctctagactctctctctctctctctctctctctctctctgtgtgtgtgtgtgtgtgtgtgtgtgtgtgtgtgtgtgtgtcagagaaagagagtgagattgattttttattttgaactgactaggtgccaccccttcattaccatgctgatttaaactgtcaagactgcagcctggcctgaccactgaggagcaaagacaataggaaaacagaaggcgactcaggatgcaaatgcctcattgttacagaacaataaacagattcacccttttgctaaatgtcaggttaatatcctcttggcaccagctgtgcctctcccctccttccctgccacagtgagtccaggctcctggaagtctgcccttcaccagccacctaggctcagcactgggcgtcgaggagagcaggtgtggctggcacagtaaatgcaaacacaaccagtccaaccgcaaagtggaatcagcctttgcatggagtgatatcctgggacagcctcaagctctgactttggggagctctgggctttgggctacagcttgggtagctgactaagccaggggatggcactaacacatgttctccgtgtacttactcacaagccaagaacaggtaggcaaggagggaggatgaccttcaaggccagttaccaacaggctccaaatgcatttcccatggatgcccactgggcccatccccattcctccctccaccaagtccctatccattctaacttctcatgatcgcttctttctgccttatctctgcattgacattgacactgttgttgctggggggctttgctgtgcttgcctctgctgccccaacaggtctccttgtcgccataccattctccacagtatctgcagagtctccccagttagatgatctggccaggtcactccttaactcagaatacttctgtagctccctctggcttttaatgtaaagccaaacccttagcaagccactgaggaatgagtttgaccccattcctctgaactcacatggtcctttgagtttaccctttgcccaacccttattatccaggatgggggttgactgttttggtttcttcccccccatttctaaggacaggaaccatgcctcttacctctgcacaccctgtgccttacatggggtatggaacaggaaatgtgctcagtagtgattggaagccattcattccttactcagacctctctacaaattgtccctgagtctaacccacaacttccctcactgcaaaaatccttcagattgctcctgacaggactgtcttcctcatctcatctgttttctctgtcctaatcactctctggagcttagctcaggttcccccacaagtctcaccaccatgaagcctctacactgttttgtcttctctaactgcatcccccacgtggaacttcataacggtaggctttgtaatagttactttacacctctgaacctcatctacaaggatggttcacaatagatttgccataaattttaaattatgatgcaatataaataaagcacatagcacagaatctggcacacagtaagtgctgaaaatagatttgtctgatggtgaggacgagcgtggtggtggtggtggtggtggtgacagtgataatgatgatgatatctctgttttatattgcaagacccagaatgtcaattccttctttgagggaaagggccactgcttatagtggtcttgacaaacttcaaaacatatggcccaatgcttatttctggtggaagctttactgaccatattaatgctattgataatattttcatgttattggtattaatcacgttaccagggaaagagcattggattcaaagtcaaatgcagactttcagtcctgtttttccactttgggcctcagcttccttagctataaataaatgagttttccagagttttccagaatgatctgtagtcctttctagcaatgataattacgtggttattagtgagactagtccacaccaaagtgagcctacactccatccatatgggtcatccctccccagtatacctgggccccaaaatgcaagcacaccatggggaaatggaagaaattgggacttatgtcatccaaccaacagaacgccagtcctcacttcaacacacaaatgttttctgttttaaaatctactccagcagcactacaattggcattccccctcctagcagtgggttagcagcagatgttacagcaaaatgatccagactgggggtgattattaacccttctgcacagcatacccatttttgcttctgggtccacacttgcacacctaagacaagttcacccgccatccctgtcatcaagagcttcaccaccttcttgtctagacaagcttgaatcccaagcagaagaggagactgagcaccatatctttgctgctgtttttgttgttattgttgttgttgttgtttgagatggagtctcgctctgtcacacccaggctggaatgcagtggtgcaatctcagctcactgcaacctctgcctcctgggttcaagcgattctcctacctcagcctcctaggtagctgagattacaggtgcccaccatcacatcctgctaatgttttatatttttagtagagatggggtttcaccatattagccaggctggtctcgaactcttgacctcaggtgatctgcctgcctcagcctctcaaagtgctaggattacaggtgtgagccacctcgcctgaccagtatcaaatcttatcaagtatcaaccacatcctcctataaggtgagaaaccagaccccactgtaaggtaggactgcccacaatggtgtaaagagccatctgggaaataaatagtaaatagcccactgcaaaaaaaaaaagtttcaagacagacaaacctggcttctctatgtatagtctgtgcgatcttaggtaagccacttaaatgctctctcagtttcctctactataaagtggggatttttatgtcaacacaaccccaggaaataggctttgagtataataatattcacaaagcacacaaataggcactctgaagaggtcagcccctccctttccaccctgaggaccttgtgggagtgcacacaacgtgacctcaaggtaaagtgggactctgctccactgtttatgacataactgggttgtcttgcacattttaaatatctgtctgtgtctcattttcttcatctaaaactattcatatccccaagatttgttgttgggaattaaacaaaacaatacatgcaaaacagtacttggcgcacagtaagcactcaataaatatgtaattgtcatcacccatgttatcattatcatttaatgatgctgaagaacaagtaagtgcttatcacttcctttaaatcttggcaccaaccacactaaaatctcaggcaggcaggtcaaactgcaagtcagagggccagtactgtcaagtcccaacgaggccacaggaccagttacccatccgcagattatccttggaaaatgtttaaagcatcatccactctgatgtcagcaggtgtgtgctcaggcagtgctagtgtgacatcctataaaagtcagaaaaaaggcctcaaagaagataacctgagccaagaacacaggcgtagcttaactaaaatgtttgtctactcagacaccttggcccctgtccgtggtcctgaaagagacaagtggacaaagactgacgggtggtcatgacttttctttttcccttttgcaaatagttgaagacctcttctgatgcaaatggtatcaacaaaagataacagaagaaaacatatatgggaggtcatgacttctgagacatttccaaggagaaaacagaaagactcttcgacatcaagttcaaataaacaaaattattgagaataaatatatatctatattttttgtttttgtttttgttttattttgtttttttaagatggagtcttgcactgtcacccaggctggagtgcagtggcatgatctcggctcactgcaagcttcacctcctcagttcatgccattctcctgcctcagcctcccgagtagctgggactacaggcgcctgccaccatgcccggctaattttttgtatttttagtatggacagggtttcaccatgttaaccaggatggtctcgatctcctgaccttgtgatccccctgcctcggcctcccaaagtgctggaattacaggtgtgagccactgcgcccggtcaatatatatctatatttttagtcattgggcttccccacctcttataccctgactctaaaatcatcaaaaaacccttcataatgcataccagaaataacacaaatcacttgtgtggtctttggctactgctatggtctgaatgttttgtcccctcaaaatccatatattgaaatcctgtcatccaatgtgatattaggaggcaaagcctttggaagctaactaggtcatgagaaggatctctcatgaatgagactactgtctttaaaaaagagattccagagggccctcttgtttcttctgccaggtgaggacacagtcagaggactgccatctatgaaccagaaagcaggccatcaccaggcatggcatcagttagcaccttgatcttggattgcccagttttcagaactgtaaaaagtgtttttgtgtcaaccacacagtctaggtatttttgttacagcagctcaaatgaactaaaacacctcccctctgttggtctggataataagaaattgaacaacacgaatgtcctatcctgaaaataatttaattcttctattccctcatttattgcaaagacatgacagaaaatatttagtaggagcaaggctctgagatttcaatcctaacctctgattccagtcctaaatccatcactaatcaggataagaccttgggcaaattgcttcacctctttgtccctcagtttattcatctataaaaatgataacaaaaataatacttagttcataaggttattataaaaattaaatgagataatgcacccgaatagcttaaaaagtgcttgccacattgtacaaccccagtaaggataaatgttaatattataattagttttattgttattattattgttgttgttccaaattagacgtaaccacatattggtttgcacaggtgccctttctttgtactgtttctaatatctaaccccttctatcctctgcctgagaaaactgtggacatatcacgtaagatctgaagaaagtttgttcactcacccacccacccactgagttcaccataaaaagaattcagaaatttcttacaatgggagatagtaaaaacataatggccacaattcccaaaaagctgcagagagcttatacaccctcagtccacatcacaacagagccactctccactcccttacccagccatgcttggggccactcctactcacttcctcatcattctgtcaattttagaggagcccacggggctcacacaagctgtgcagatcaccaaggttagtatctccattgccttgctccttggaagaatgttcaatattagttcagtgttcccagcccacaacctaaagcctccaggagtcaggatgaaatacaaacaatggcaatgacccctccttatctggaactcacaataatttcgtaaatactgctatgcaccttggttccttcaatcttcttaacatccctccaaagcaggcggttagtgatctcccgattatacagaaaggtagctgaggcctagagattgacatgacttgctaaaattcacacagctatcagtgaatggcaaaatcagaacagcccaggatggctcttcaggcagcaaagtttagtgggaaaagcagccagggagaactcaagttcaagggagaacttgaatcttaacacttattacctatatgacctcaataaagtcacttaacctgtgaggactcagtttcctcacatgtaaaatgaaaatagtattttccattcaggatgctggggcatgcaataatgtgggagagcactgagccaagtgtttggcacagagatgggattaaataggagggtcctattgttattattactatggttaggggagccccattccctctccaacgtacagagccacacggaatctaaactaaggaggccataaaacacactggctccagtctaagtccagtgtctttctccctgccccccatgtacctgccagccacatgcctgaacagcagagagagagctcaatcatcacatgtggcttatctagagaacttttaaatcccacgctggcctgacccaccccagctggcatactctcaggcctctgacactggcagcaggtctgagcatgaggaatacagtatctaatctgagcaataacttgcttatccttatatttaatttatacaaaagtgctttatgatatatggcatgatggcaaccatgggtcagtgaaacatatgaatttccattaaacatatccacttccataaacaaccattcctgttttgagtaggtagagccagtaaggatgaaatgatgctgaagaggaaggcagtggagggtattttataaatatcaatattcaaataccacttaagtcctcatatttacttaataaatatgacaatgggccaggcacagtggctcacacctgtaatcccagaactttggaaggccaaggcaggaagatcacttgagcccaggagttcaagaccagcatgggcctgtctctacaaaacctttaaaaaaaaaaaaaaaatcagctgggtatggtggtgcatgcctgtggttccagctgcttgggatgctgagatgtgaagatcccttgagtccgggaggtcgaggctgcagggagctatgattgcacctctatactccagcctgggcaacagagccagacctcatctctaatatatgtatatatatataaaataggtaacctgtcccctgtcccaaattgccctggggagcactgcaaagccttaaagaaatacattggggattatctgcttgtttggttacccaagctgctacttcctttttgtctataattaatgaaattagaccatgcacatagatgagatccactcaagtctacaaatattgacagcactagatatacattttgaggccatgaaaatgcaatgaggaacaagacacaacccctgttgttacgagggcacagcccattgtgggagacagattacatagcatttacagtacgataggctgagtacgcaggggtaagggaacacagaggaggaacatgtttcctgaatttggggcccaaagctgagacctaaagcgtgcacaggagttggccaggggatgagagggaaaaaaaggagagagagttgctctgagttaaggaaacatttgagcaaaaaatccatttgtaaacagagcttggggacctcagtgctgccactgagtgacaattcataaatgcagcaactctcagccacccacccaacattattctgtgcttgatcaagagctgaagcagcctccagctgctgccaccttctgccagcagtgttagttccatgagggctgttctgcccatggatcattgatgatctgttgtcccctgcatgcacagaccagaaaccccacctccccacctgctgctgttaccctagttgacctcctgcctcactgggtggcagaatggacagccctgccatctgcttccctccccagagcaccaggcatggaacactggggatttatggggtcaccaggcagagctaggagggttttgcagtggtagggaactagcagtacacttgaacacatccatgggatcacagcaaggaggccaaatgagataggatagggattcaaaggagaaaaacagaaccacagaagtacacagctctcagatgaaagccacttaatcagcctcatcccattttccaaaattcagacaaatgcagagaaacactgggcttatttagcagtatctatactctaacacacacatacatgcacctgtgtgttaatctaattagacagcttttctagttctaaaggtgaaatgcacgaagagcaagttcttaggttattttctctttaagcaagggggactcttacatccaacacatgcaacagctatttagtaaaacaaacacatgttttcattctgcttcctgcttggagctccagaatggcctcatctggtcaaggaaggtctcggttctgccagcccattcgagaaggcaaatagcaatggtatagatggcatagagcaggatgtgagtcctataccttggattgccctggacagagggcctattgtctcctctatttttggaccaaatgggtgagaaacagcttatatcaagaatggcctggcacatgcctgtaagtccagtactttgggaggattgaacccaggagtttgagaccagcctgtgcaacatagagagacccatgtctaccaaaaaaaaaaaaaagaaaaaagaaagaaagagagaaagaaagaaagaaagaaaagaaaagaaaagaaaagaaagagaagaaaagaaaagagaagaaaagaaaagaaaaggaaaaagaatggcctggcaaataacccaaagtcctctcaaagctacattactataaacgagtcgcatgcttataattcaaaaataacatttgtgcctaaattcaaactaacacattttaatggaatggcaacatttttaggcctcaactcattctgggctcaaaataataactagaacttcatagcatttgcttgtggaacccatattccttgagcagtatctccctaggcaacagctccagtatatcctgcattagaggatatttcagatgagatgcacttgtgttgcctcagactactacggagtgactccgcagctgctgaagtgttgcctaattgaggatctactttagaaacgatgtgagtgtgatgggtaattggcacgttttcctgcttctgagagtaagctgtgcgctccttgggaggtgaaacccacttccttgtctcaccatggcttgaatgacataataggatttcagtatatgcaattgttgagtgaataaatgaataaagaaacatattagctgaattattgaaacaataagatcaagtaagcccacatagatttgttcaccttcttcacatgccccctgcctgccccaaccacacctcctttcctttgccttgtttgattttccaccaggctgcttattatactatcggacatgtaagcactttacttggaaatgtgtttattttcacatgctgtgtaaagtccaaagggcatggatttttatctcattcgctcaccgctctactcccaccacctagaactggtccctagcaagagttcactgagcattttgtgggggagttcattgtaagactctttaagaatcactctatctctaaacagaaatgatggaagatgtttttgttctgtgtatcaagggtctttatatatgtaaattaatcaaaaattaaggtgtatttgagggcgcttggtcttaaaaatgtaaccattccaccttgcactgttttcttacaaaaatctttgtaatttggccccaacataccatttgagctttattacatcatcttcttcattaccacaatcatcactaccatcactgttatcattcacaattacagaaaacatttaccaactgcctgctgagtacaaggcattttgaaaataggtgtttgggggccagaaaatgaatgggatgctgaggtctctgttctcaaactgcccatctaatgcaagcgttgagacatatttacacatgaaacatacactcagtgtcaaacaacgggttgaaccagttctgtctgacagaaatataataatgagagctatatagctaatttaaatttgtctattactcatattaaaaaatgaaaaataaacaagtaaagttaattttgatactattttgcataacccaatatatgtaatatattataatttcaacatgtatccaatatttttaaagttttattaatgagattatttttcttacttagttttggaacatgtatgacacagcacatctcaattcaggctagccatattcaagtgtctaacagccatatgtggctactggccacatattggaccctcagggttagactaaaggattttcagagtacagaggaggggacacatctcagcaggcacaggagtgtggagaaggtcccatgagaaaagcctctccccttccctccttttcctgctctttccttccccatcttcctcctcctcccgtcctcatccttatggaagcacaagcggtatagttgcaggggtaaataggtgtcccaagatgaaaacaaagggaaaccttgggcttacccactgagagtccctgttccacactgcctcttcttctctttctcctaggcacagccaaggaaggttaaatcccattccatcactaatgagagatctgcccacaagcactaaaataagattcctctgatcttaaaagaaaagtgtttttggactttaggcaaccctggggacttagagttgttctcaaccctagcatccatcagactcacctagagaaaattttaaaagtaaagatgccacaagtatacactcccagattctgatttaattggtctagagtgaggcctagggatgtttgcaccttttttaaaggctcctaggtgattctaatgtgtaactagacctgagaactgctgggctggggtgcagaaattgcagagtggaggagaggaaagagtggccagttggctatgatgccattaaccacagcactcagcatcactttatgtaccctttctcgttggatccatatgataaccctgtgtgacaggtaccactaacctcattttgcaagtgagaaaaccaaggctctaggaggttaagcaacttttccagggtcacacagttagcaactgggaaaggaagaaactcaagcccggtcaggtctgactccaagacccatgctcctcacttcatatcaccccttgtccctcctcttcatcaaccttgccctccatttccactccaccaatcttggttcaaggtgagaaactgggatgggaatgagaggatgaagaaaactaggtaagatgcagggacaggttgggaaaaaatagtaatgcatacagcagatgcagggggaagttgggaaaaaaatagtaatggacacagcagcaagggagaaacctccttcatagatggccagcatctcccagatatttttttaagtgctagatagattaagtgttgaaaggacacatgcaggggagggtgctgatattgactacgagacttgtttggcatcatgacaaggaagaagtgatgagaaaaggtgtcccagaaaattaaccattacctagcttccacagaggatcctgccctaaccaacagataggctagaaagaaggctacagaacagaagacaaagaataaaagagctgtacacaaagatatgttctttttctgaggtttcatacactgtgaaatttccaagtagtgaaaaattaactcaatgcttaaaaaaaaaaaagaagatgaatgcaaagaaagaaaaaaaaaagaaaaatctggcaatgttggaagagaaatcagtcttgcctgacagtatttaaattgaatgtctgtgagcatggcccacaatttttagtgaaagtagaagctattaaaaagtcgatgcacaagattaaaatttagaatgctattttaataataccaaattctactcaatttcaaatggctgtcatttttaagctccaccaatttgataacacttgactgatggcattgggagctgagtgatgggaagattgaattcggcaggtccagctcagctgacacagccagagagatgaatactcatcctcaaagaactaagcagaccaggctgatggacctcttagaatctgttttcccatctgtaaaatgggactaacaatatctgccctactgaaaggaacaagtgtgatggagggtgaatgaaccattgtcaaaagcattgtgaaggtcaagaatgcattgtgctcccgctgtgggtagagcctgtgctaggtcacaggtcacctctttctggaagcttcccacatctcccaattctaacttagagaatcaacaagtagttggactagtcagtgctgggatgagaacatgctcaggatgttccagaactcggagacaagtcatctgtcacgtcattagatccaccaccttgtaggactgggagtttgctctgtgtacctagcactgtgcctggtatacagtgagtggatcctcaataagtatttgtagttccctcattcaacaggatcttgtccctaatgttttgactttagatgggaagacaaatatttaccaagcataatataagtactgatgcagagaccatcagagcattacagaggaagaagaaacactaggccgggcatggtggctcatgcctgtaatcccagcactttgagaggcccaatgccaaggctaaggcaggcgggtcatttgaggtcgagttccagacctgcatgggcaacatagtgaaaccccttctctactaaaaaatacaaaaattagctgggtgtggtgctgcacacctgaaatcccagctactcgggaggttgaggcaggagactcgcttgagcccgagaggcggaggttgtagtgagccaagattgcaccactgcactccagcctgggtgacagagtgagactctgtgtcaaaaaaagaaaagaaacagaaaaatcatttcaactggatattgaaaaatcatttattataatcactgtggtcatgtttaatgctgttgacaaatatttcctgctcttcacatcctaggcatgcagcaggattacattaccctgcaccctctgaagttaggctaagccatgggtcctacactggccaatgaaacatcagcagaagtggcatatgtcccattttggcagaaactttaggagctgtgcagttctccatgttttcttcctgcagtatggcaaatggaaggacatgttaaaatgaagaatcttgggggaaaatggctccagaagcaggggtttcagtacaacctatacagaacatgaaggacaagcaagaaatacacctttgttgcagaatccgactgagatttgggggccatttgttattggcgcctctctttactaatacaatcatgtcaggaggagctccagcaaagtatctgtaagggaaggggtgagtgagcctgaaggctcttgagagtgaaaaggaaacaggactcaagcctctctttggtcacagactcagctaccttctttcggagatttcctccacagggatacactgaaaatgccactcaggtttcagaagcctctgagtgaggagccccagactcctgccttttatatacccatctcccgccctcatgccttctggaaatggtgctaagtatagctgggttggatccctggctcaattactacatcacaaccagagactgaggaataaacatgccagggtggggctttttctctttgcccgggatggctctgcctccatctctctcagctctcagcgaaaatcctcccctgcagccagaggcccttacagaccctaagcctctgctcctgctcttctccagcaggtgctgcctccccttctcatctctgcatctgtctgtcctgcagagctcagttcacaccccatctcctccagggaggaccactacagactccagcctattctgtgctcatcctacgagctttgaacccatctgacactcaaccatgccctgtcatcagaatagtgctagcttgttcatctgggcaggttggatctcttcaaaggagggaggaacccctaaatcttgatgatgtcatttgtgaaatgaggcccctgctctgaccactcagaactgccattgggcatcaggtgagttgtcagatctaaagcccctgtcttggtgccaaatacctaacaggtgctcaagaaatgtaagactcttctcaattccctttgtctacaagacagtttgacaaagtgggaccagctcttctcctcccacagtaagcccagatgcgtctctagagatgtgtctcatgcatgtattctcaatgggggcaaagtctcctccaggaaggcagacattgaaaagtgaaaaaacaacctttatgtataaacacagatacatacagagtacacacacagatatacagtgtatctgtggtattaaaatctcatggggagggggtaaggaagtgtttttttaatgcttagaaaagctccataggtatgcaataaaggaaaaaaaaaaggcaggctcttccatgcccatctcagctgagcctcttatcacttgtctcttatatttcctctcttgtgtctcttccaaatcaataaagtgatattttagaaaattctgccaaacccacatttctccctcctccaccgccttcccagcctctctgctcctgtgctcatctaatctgctgcctttcctgggatgtcagccttgcaattggctacagggaaagcaggcactggagagctgagagactccagtcttggttttccagacatagcagatgtgactgtgtttgtatctacccccagcaacaccatggggaagcagagctaggcactcctgcctcaccccacctccccaccacccagcttgactcagaatggtgcctcaagtcaaagacctgcctgcaactcccaagagaactaaatgtttccctccactaggggagggttactggtgggtttgggcttaggctggtttgttggaaggtggctgacactgcagtttggctcacccaaggtggagtccaaccttgcctgtcctcgaagatggaaagctgaataatcaccttccagcctcccttgcagctataggtggccacgccacatattctgcaggggaagatgtctgataaaaagcaggagggaacagcttaacctgatattgcccttcccccttttctttctaccttgaaatggacccaaagtctgaagctctccatctctcttgcagccatgagtgaaaagccaagggaatcctgacatcctacagacactatcttgacatgatgtagcagcagcactagtgccagaaacccctacatctagacttctacttgtaggaaaaactgcttttctctctgttacatgaagcccaaggaatcctaactaacacagaagtcaagagtgacaggcacagacacatgaaaaaatgctcatcatcactggccatcagagaaatgcaaatcaaaaccacaatgagataccatctcacaccagttagaatggtgatcattcaaaagtcaggaaacaacaggtgctggagaggatgtggagaaataggaacacttttacactgttggtgggactgtaaactagttcaaccattgtggaagacagtgtggcaattcttcaagcatctagaactagaaataccatttgacccagccatcccattactgtatatatacccaaaggattataaattatgctgctattaagacacatgcacatgtatgtttattgtggcactaatcacaatagcacggacttggaaccaacccaaacgtccatcaatgatagactggattaagaaaatgtgcacatatacaccatggaacactatgcagccataaaaaaaggatgagttcatgtcctttgtagggacatggatgaagctggaaaccgtcattctcagcaaactatcgcaaggacaaaaaccaaacactgcatgttctcactcataggtgggaattgaacaatgagaacacttggacacaggaaagggaacatcacacactggggcctgtcgtggggtcggggggagggggcagggatagcattaggagatatacctaatgtaaatgatgagttaatgggtgcagcacaccaacacggcacatgtatacatatgtaacaaacctgcatgttgtgcacatgtaccctagaacttaaagtataatttaaaaaatgccaaaaaaaaaaaaaagagtgacaggcataatccttacccatctgacttccctggagtctctttataaacacatctgtactacaaaacagaatgactagtgcttctcaatgtccagagtgcagggagactcagagatgctctgccatgctttaggtcccagggtcatggcctctctgcagggggttaagcacatgggctttgcactcaaattgacctggattctagtcctaactcctccacaaaagctgtgtgatcttagacacctcaccgttctgtatgtccgttgttttcactgtagaatgaagttgacaacagcacttatctcatagaattgttgcaaagattaaatgagatatatcacacactaatctcagtgcctggcacatactgtcttctcaatacgtgttagctgtcaagataattttccactttccctttctgggtctaagtccttctatgagcttgtctgtctcatttcccaattatttctcagtgttttctcatttccttatctctgtagctctttccttctcctttctctgtttctccatctctctgcatgtgtctccatttttgtctggctttttctccctcctccctcattcccattcaggtttacagtggagaaacacagcaatttgcctaattttccctctcccaggtcaagagaaagcccttcccaggctctcagtcacagttccttagacgtgggtcccccagatccccttgtgttctgaaatgcctgtgatgggaaggggaggggatggtgatgtggtctcctgccaggaaaagttgctgaaggttggggctggtgaagggggtagtgagagaggggcctgctgccctgcctcaggaatcacgtccacttcatgactggctttagcagctgagtctaaaagctttggaaggaaacgctgggtccaccactggctccattcctgcctccctttctggcctaccccaggattccttggcagaacttggaatttggtatagtcagggacaaactcttctctcagatgcttactgtcccaaatggaaagcaagacctaagtgcataatcctaacccaccatggacagacccctctggctccacagcacccaaaagacccctctggtgaggggagcaagtcaccaataataacccacaacacttgccctgcactgatgctgcttcaaaggcctttcctgtgccaacctactgacatccttgcagctgcaccaaggaacagactcctctttccccattttacaaatgtcatggcacatgggggctaagtgatatgttcaaggtcacacagttataaatagcaaagacatgttccaatctaagcaataacaacagcaataataacagcaacagcaaaataatattaagataattttaatgataaaaacacaatgtagcatttattatatgccaggcacatgcaagggctttgcatctattagctcattaaatctgacgcctaccctgtgagataactactatcattgtccccattttacaggtggaagggaaggtcaagggaaattcagtcatttgcccaaggcctcgataccataagagtgtggattcagggatgtgcatgctgcagtggccaaggcccacaatcttatgggacagctgaccacccaacccccagccagattcctacaagccccaggagtaaacactcccatgaagaatcagctcaagctcacctccaggctgagacaaagggtcaccaaggactggccaccacacgaatgcttctccttggtcttacaaaacatgaaaggtgctattatcagaagccatgcctgcttgcaaactacagaggtgacacgaggtaaattcatttccttcctgtcaagagaaactcaacaagggtataatcagaagctaatgtgtgtactgtgattgggcccatcacggggtggcacataattgaacaagttctccatgcctggaggagcagagccgagccccatcactgggaagtgtcactcatctggccagcacacattggtttttaataacattatggaaataatgctgcagggctgtggaaaggacagaagcttgaggggcagggcctcatcaggtctccgagagctttgaccttgagaaagaaccttctggccccatccagaatagccactttcctcagggatctctcctgtaggctttgtggatttatgtctcctgggcttaaggaacagggcttggtgtggctgaaccttcttgctgaatggatcccaggggaccccaggtgagcattgaggccgggttctcaagagactgaagggggtcggggggttaccagagagaggacaggccctttgcttccccagtaactgttgacaatggtaatacctccatggcccctactatgaatcagataattttctgaggactttatgtatattaactcatttaaactgaaaaacaatccatgtgataggtattgccattgtcctgattgtatagataaagaaattgaggcacagagaggtgaatttatctaagatcacacaggtgggaagttgtgtttgagcccgggcagtccatcatcctaaccatactccctactgcctcaatgagctgacacagcccagccctgataaagggggtggcagaggggagggggatgaggtgccttcctggctgttggcattcatttcattcacatttttatcaggcacccctttcaaccagatactgctgtaggcactgaggatacagtggagtataaatagataagagttatattctagcgaggagacacaaatcccatataaatgtacaaataagacaatttcagagaatgccaaatacaatcaagaaaataaaaccaagaggtcatagtgtccgtggcaggaaaaggtaagtaagttattttagagaggaggaaaaggtaactttaagaaccagagacaactgtttaggagaaggcctagccaagactgaataattcatgtgttaagaggttttcaatcacctaccaaatacaggaaggaaccagtcattgaggctattgagaagtcaagaagttagagacctatgaagacaaaggcagcctgggctctgctccacctgcccactcatgggcctaggcatcagaagctccgccatcttgcactgcaaccctggaagccacagtctcttcagtgccatcagggaagacagcaactgcaccaccacacacaggcatcccctgccccagcccagaagtgatgcacatcccttagtgcctcatgtcctgcctaacagtggatgctggaaatttacaggagcaactggaatattcataagcctaactgcctcggccaccagcccacaagggacactaatggagacagcagagttgcgtgagggctcacgagctaagaggtggaacccagccaggctgagtagaaagtaagccatcgacaagcagggagttaataggtttttccaaatgaacggtccttaatttcaattcattgagaggtgagggatcaggtgaaggaagcaaggtgaaaaggaggattaatccatccatcaaggaccttgggtactgaaaacatgaaaagatgaatgcatttgtgagacatactgattcactaccatgagaaataattatcttgaagcttatttggtcccagaatcaatctttatttaaccgtacttatttttggtggctcatcctgcttgcctctcttggaaactcaagaaatgctttctctatttttttttttgggtaaattccaaagacttgcatatttcatatttttcaacaggatgatctttgtgtagactgactgtcttccctcttcactagtcctctctatcattggacctcacccgtagtaatcactcactccacaatcatcttctcttgtttcctgcatcactcatcactaccttaaagtattatttattgatttattatttttttataatctgactcttctattgtaatataaggtgggtaaagacggagacctttcctgtctccgttggccacatccccaacaccacaccaatcaagcaacagactaaggacacagctaaataaatgaacaaaaagataataataacaatcatgtgttagtcttcataacaatcttcatttattctttttgattattcccatgttacaaatgaagaaatggaggcacagagaataattaagtaacttgctcaaggttatacagatattgtaaaacagccaggatttgaaaccagagagtttggctagaggttccatgctttgttggtataaatatttaagaaatatttgttgattgaatgaataataaataaatgaatggcttccttgtgtttcctgccttctttaccagggttatttgccttcaactttcactggaccctctatgtatcaggcatggtcttaaattctcttcacacattattcagttgagggtagtcccatctaccatatctccatagaatcggtcccaagcctggtacttagaactgccctgcattgtcaggctccccctttgccaggtggtgcctccctaatctgaaatcatggactgagtaccttcaaaagaaaaattaaaccaaagatcaggaggagatgcttctgacttagtgagtctagaagaccctggcctcccttgcccactctgcccagaaactgaatcccagagagatgaagttatgggtttcatacctgtgtctgcccatcaacccaagggggacaaatgccaacatagaatgacagagagggaaggaagaaagtgtttttcctaattaattggctctaaaagtggagaggaaccaagttgggttattatagaagcatcagcgtccgacacaggtcttcaactgccatgcaaataccccctactctgcaccatgcagttcccatggtttactctgttgtgatgtaactgtgcatgtttctacctgaacccattgaacacggctttgtgcttgaaccttgaacaatgcctgggacacagttggtgctcaataaataatgatgggataaatgaatgagggatccccattctcctacctaccttggccttgtcatcatctctcacttttgcgactgccagataacacctagctctatccccttgagccatccaagtctcagacacattcatatactgactgaccttgaatacatactcccttcctgaaagagatgcttcccaggaccctgcatcatggaaaataggaatatcatggtaaacgttgctttaattgaacagtggaatctatgctagtcttcatgacgaaccttgaaacacaagagtgctgcagtaaccatcattcctgaattgtggaacttcacagactcaggttagccccaagtgatgctttgctgagcaatttaaaacccagtcatgcaaagccaagtgctttcatgtttgagaaacaaaaacatttcaactgctcagcacatctaaatcagtactcccttaacaacccaccttggttcttccccttgattctgaaagccaatttagtaagaaaagcatattaataatcttgccctctcactggccttccctccctccctcctattccagcatcttgcagctggtaccttgggtcatttgttttgtttttgtcccttaggctgaagtgcgtccacagttttgaaactgctaactagagtttatatggaaaattcagattagaaacaaattcaaatgcactctctcattttcctgtaatacactgggtttcttcccccaatcagctagaagacttgctgggtacctcctcattgtgtcctgttggaaagtgtctcttctggtcaccttgactgttaaataagtaaacagactcattggggttgctgtgtcctgtgacattggcacagactctcaccccagccaagcatgcacatatcaatgggccaccatctgtggcagaattaccagacccaagatggaatttgatgcatctgtcctggtgaaatggcattatacttctgccatattcttctggttcaagaacattgtcctcaagcccaagggacagccctgtccagcataaacatgattaaaatgcccattgcccgactgccctgctgaccaagaaacatggccaagcacagagtctgcaagcagcctgcatgtgggtctaaagaagaggaagggggaaagtgtttccagaaagtaaggttgccaagatttgaatctcaatgtcacaatctggctttatgaccttgggtgagtcccttaatcccacagagcctcagtttccccatctgtaaaatgaagagtaccaatatcctgatgtgttgtgaggattacatgagatcattttcgtaaagcaccctagcacagagcctgatacagtgtcattgggagctaagatttaccagcactcatcatataccaggccttgtgcatgaaccccacctacattatgtcattaagcatcactgcatgcataagaaatgggtgttaccatccctatgttacaacagagaagactgatggtcagaaaagttaagtaacctgcacaaaggcaaggaggtagagacgagtgaacttaggattggaactcaggactctcttaaccacatgaagagaatccaagtggaaggtgcctcctaccaacgctgagatgaggttcgtgtctgtgggcccctgtctgaggctggttgacaagaagctttagagagacgcttggggatggcaggcttgcagccagaggccagggtttgactcctgtatgggctgtgtgaccaggggcctctttaccgctcgggtgtgcttcacctccttcctccataagacaaggacaactgcatcttccctgtaagactattgggaataaaacaatagggctttgtgacctttgacctaaggtaggattcttatactaccccatgctctatgacatgataagaagacagtaccaacactcagcacagtgttaaaagattccagcaaataataatggatactaacataataatagctaccatatatagaatacattatatttcagaaactgtactaaaaccttaattaaagcacttaatcctcaatgcaaccctgtgaagtagatgctttttattatccccttttacagatgaggaaactgaggcatgtaatgattaggtgacttgctcaaggtcacaaaactaagtgctgaaaacttgggattcacatggttgcatcaaaactttattgaaaggattggtcaatccaagtgaacaacacatctggactgtgccccatagaaacaagcattttagtttcactagaatcaccgggataaacagaggcaagctaacccctttactacaggacatctatggtctttaacttgtaaatacgaggaaaccatcaagagggagatagagtatgcagcctttcctgagctttgaggggcaacagtgtgctctgacatacgattcgagatgtaccaagtctgagtcatttaccctaaatagaacagccttccattggctgttggaaacacaaagtaaaacccaaagaagagagaaagcaaaagtgaagaggccattgtcctcgatcctttatcttttgttctctgattcagatcaggagaggtgtgtatgcctgcagacctggacacccgcaagccacatgctgaatgaaggcccacagaagtcccaaaaaaagatggaaccagggaaaggaggtcagcctggaacagtcctgggaagctgagacccagcccagaacctgctggaatcaatagtctttaacacaactgtgacattagcttgggctgctgggatccgtcttgaaagaagaagctttgtatatttctgctcttattccccacaggatccagaaatatatttctgtaattcttttagctgataagtatgaaaaacagaattttaaatattccagtagggacctgacagaacagggccatcttcattagctgctgaatttcccaatgactcctagaaattgacacaattagacaaaattaagtgcttctgtcctgaggataggccgccactgttctttagggcatatctttgcaaaggaaggtgctggaattcctcacaaaagccacatccctctctctctcacactctttctctgagcaaatctaaaatctagtgccaaattccttggagctaattctaaaaccaggaaagctttttgtaagattataaagattgtattggactttgaagatgagtccctttgctcagcaacttactttcttaatgcaatccctgaattctccttgctatgctctgaatgtttatgcctgcccacccccaattcatacgttgaaacctcatcaccaatgtaattatattaagagatgaagcctttgggaggtgataacgtcatggagacagagctctcatgaatgagattcatgcccttataaaagagcctccagagagctgccttgccccttccaccatgtgaggacacagcaagaaagtgccatctatgaaccagacagcgggccctcaccagacaccaaatctgctggtgtcttgaccttgaactttccagcctccagaactgtgagaaataaatgtgcttatcagccccccaagtttatggtatcttgttacagcaggccaaacagactaagacattcctccatcctcccatcgactgggcaaaaggataatattacttccatttctatggtgattatggaaactcagacccagcaagtggctcccaacccactgggtgagtaagcagggaaactgaggttaggaaatgaactcagttccttttctccccatcatcttttctcccctataagaaacttatcagcagttcttttgcatgtagagtcaatcagaaaatcattagccaaggtcagacaagaaaccacagctttggtttctttgatttcaaggttagaataagagcaatggaactttaaagagcatggatggtagtaactgtctctgagaagccagccactcaaactttccaggcccagaatcaacatttatttggaaaaactttttgttgtccatttttttaaagagctctaaacttccagtgagtcttatgtagatctatttatatgcccatttcttcttttattttttgagacagagtctcgctctgtcacccagcctggagtatagtggtacgatctcggcttggctcaccgcaacctctgcctcccaggctcaagcgattctcctgcttcagcctcccgagtagctgggactacaggcgcctgccaccacacccggctaatttttgtatttttaatagagatggggtttcaccatgttggccaggccagtcacaaactcctcacctcaggtgatccaccagccacggcctcccaaagtgctgggattataagcatgatccactgtgcccagcctacatgcccatttcataggcaagaatactgatgcatagggcacaccacactttacaggcacaagaatgaacaagtctttagagggtaactatttcttgtgcaagaatcaaatgcaactgctgacacttacagttttatcactggtgacagcatgagtggctgagtgagcaggatgaatcttgagcctggggtgtagaccagagcaggggcttccaggtgctcacacctctggaaagcaagaggaactggaacagttggagttcagaataggctaaaaaatctcctgccagtcttcacagcagaatctctgagtggagcacacagccattttgaagttggcctacttggatgccagggctcaaaaattctaatgtggccaaagaaaccttcagagaactacagcaaattcaactgataaatttgttctactctagaaaagacactgccaaaattccagtccctatctatcagggaccttggataagtcccttcccctgcatgcatatcatcacagaccatcctcatatgggggtggggagggtgtctctctcccctcttcagctgccttcctacctccaggggtgcaccaattcactgtgatgacctcacaatcatgcctggtgattatgaggacttagtgggatgatgctctgggcaaccacagggattgctcaccggtgactcagtggttgactcaaaggctagagggtggtttgggggtggaggcagaggtccagtgagctgggctccaccctttctctccctgcagtcccaactccatttttatctgtgctatatgttggagtctagccaagatgtcatttgaacaaagattctgaaagatcaaagaaaaaagtttgaaaaccaccaggacaatgctttcaggggactttatccaaaagactgcaacaatgtaaagagatacgattgcttttattactgtgatatgtttaaagtattataaattttttaagagctttgtaagtgacagaagtgaagacatgctcattttaatgttaccagtcaactctgagaagactaaaggtcaagggacaatgaaaatgtgacccttaccaacgacagaaactcccaggaagccacaattaactcaagaccaccaggatatttggggaagtttatccttctggaaaccagaatttctgatttgtggaaaattctatagatattctctgccagactccagcctatttggtaagctggccacagatgatttagaacacaatgaccctgatactcactagagctctgagtgtggctggataagcccatttcagcagcatgtcagcccctccctgaactaggctctgtcactcagatctcagatcttagggcagctgtagtctgccccttgctttcttattaccccagataaccaatgttatcctctgtttttccttcctcccagggggaaaagaattcagaaccctagtctgagtatatgaattagactctgcaaattgtttatatgagtcattctcaaaactaggtctggagggtccccaagagatccacaaatttcttgcaatattcatgtaacaatgttcatctctttagatctattaccattgagtaacccattgatatttaacaacaaaacaacagcaaacaccatcctgatagctttaaaagcaaccctgttcttctaattgtttctagtgcatgctttttgaagctaaactagtagactggattgtcctcaagtagactggctcaccaaaggtgtccacaacaagaacatttcaagttcagattggacaggaatatttatgagggtttgaccagtgctagacttgccagacaatgtgcctgaatagtctccctgaacttctctcttaaacacaaacaagatcctatgctggctttctggccacacctgtgccagccacaaatgggctaaaacacgtgaaatgtgctgtccgcgtgcagggttcaaatcagataacaaaatacacattgacggttctctatagaatgaaaaatatcctactttcattgcatgctggtgttgggtcagaaaacaacagtttcttatttctcctggttagtggtcctttggaaatcacagaggaaatacatgcagagagttaagaggactacttcacatctgttgtcccgtgatgctacttaactgaacactacactcatgtgcccattcccgttccctttcccctttatggtaaatgttgtcccatatgactttgtgattgatggaaatgttctctatctgtgctgcccaatatggtagccactaaccacacatggctattgagtactcaaaaggtggctaatgcaaagagaaactgaacctgtaatttcatttaaacttaaacaaccactcgtgtctagtggctaccatataaaacagtgaactaagtctaaaatttaggatcttgcagtacagggtgtgtgtgtgtgtgtgtgtgtgtgtgtttgtgtgtgtgtgttaacaaaacaaacactgctccttctgtagtgagcactggcctatggccagggtctaaggaatatgcaaaagaaagtgactggaagttttaagcttttaaggttttatcaaaagacatttcttaccactccctctgggcagtactgtagaacatctactagggagaggatgatatgaagatagagaagcaacaaaagtacagacacattagaggcaaaatatagatgccaccttgtaaactggttgataattcagaaaatgacagctctccccgacttagttggaaaggcaaaggccaaatgggaaacatcagtctcttcacgtccatggaagacaatcccctgaatgcaaaattagaacttggtggctatttcctgatccagccccttgtatttttcatgaagcttaaaggagattaatgggacaatcaggatattacagatgagaagcacaggcatttcaaatgaggctgtgacaaatggctgggaggcctttagaatgggggaagagaggatgtggaacaagccctggactgggaagctcctcactatgattcacaccctggtcctgctaatgaccacctggccaggagaccctggagaggcatccaacccttccctgagagccactggacagaggaataggagccccatcactgagtggttgtagggctcaagaaggatcatattggcagcaagaactccagaaactataaagctctatttagatgaatcacattattattaaacagttcaatcaacataataattattaataatagctaagatttattcagtgtctgctattgccagacaatatatatgcaaagtctctagggcttacagcaaccctataagatatgtctatctatccacatcattcgtgcttactagatgctgttacaagtgttttccatatatatgaaggtatatataatatatacatatataatgcataaaatttgtaaatgagttaaatgaggattaatccttacaacaacctataatgtggacattacttgtatcaatattttacagatgaaacaattgaggccaaagagataaagtgacagccaccatcatcccaactaagttggaaggccaaatgacaaaaggaaacataagaacgcaattacctgaatgacagattagaactcagggattatttcttgatccaggcttagtcaatggaagagctgggacatgaacgcaggcacagttggtgaacagtagagccaggattcagactcaggcagcctggctacagggcctgttttcttcaaccccatggcatcctgcctctttttttgggggggggggtggtgggggtggaggggtggggatggagtcttgttctgtcacccaggctggagttcagtgagtggtgcaatctcggctaactgcaacctccgcctcctgggttcaagcgattctcctgcctcagcctcccaagtagctgggactacagatgcgtgccaccacacccagctaatttttgtatttttagtagagacagggtttcaccatgttggccatgatggcacgatggtctcgatctcttgacctcgtgatctgcctgcctcagcatcccaaagtgctgaaagtgacagggtaaggatttgaaactcaggcctgcctgcctgtctccaaccactcagtcttttcttcagccaccctgcgtccgttacaattcacacactgtttgtcaccactggctaatggctttggatatttcttcctcttatcagtgtgagacatctggggaggctcccctttttttcaccatttgaggactgaaagtaaatttagcttcctcagcagaaagaaaagaagctgttttggaggttgggaagagctttagaaaatgcggcatcacgtctgttgccccatttgaagaaagcagctctggaaaaggcctaggacattagttgctacaaagttctagatcattctgtgtggtaagtatgccatcatgcccatagcactcttctctgtccacaaaattcgtcatatactaataaagaatgggtgtctttggacaaagtcaaagcaagtttgtccagagtactaactaagaagagactacagagggaagcaaaaggtagttcagtggctgaattatccaaggaaaggcctagaatttgagttgtcatagactgagcatcaaagattatgtcttggagctatatagaacctttactgcccaaaaaagagagactatggaaacttcagtgctctggtaaacatttctttgatgccttaccaaaacatatgccttctgagcatttgatatggtttggctctgtgtccccacccaaatctcatcttgaattgtattcccataattcccacgtattgtgggagggattccgtgggagataatctgaatcacggggtggtttcccccatactgttctcgtggtagcgaataaatctcatgagatctgatggttttatcaggggtttccacttttgcatcctcctcatttttatcttgctgctgtcaggtaaagaagtgcctttcacctcccactgtgattctgaggcctccccagccatgtggaactgtaagtccaatttaacctctttttcttcacagtctcaggtatgtctttatcagcagtgtgaaaacggactaatatagcatccgttgtccacttcctccttccatcagtctgcaaaattccatttggggatccatgtggcttcagggaaatcaactttatcaatgttctctgttccgtggcagcagtgatgggttcagggatgggcatgtgacctaagccagtccaatcagagtgactctcaggtcttgctgaaagtgcctggaaacgatgccatttccttcctgttgggcatgatgaaggaagcatctagccccaggagctccttcagtcatattagggcctaaaaggtgccagcctttgataaagacaccaaaggatatgaaagatagcataagacagaacggagagatggaaagaagccagatccttggtgatattgttgagccaacagatcaagtttggccttaagtcagccctaattctgtgcttttcaattagataagacaatacatgccctttattatttaagcctatttgtgttaggagttctagtctttgcaaatgaaagcacctaactaatactaatgtagatctctgtggccatccttctggtaaaaggagaaggcagagtcaagggtgacattacatttcctgaaactggcagctccatctcatagaaaactcacgcattactcagtgaaaaaacgaccccctgtacacaatatccacgtgggaaactcctactcactcatcaagacccatctctaatgtcccttctgtctcctagactacatttacgtaaaattaatcacttccttctgttttacttccatagaggcatattactcattcttttatgtaactataaacacagagcaattacatacagctcaagggcagagaatgtcttattcatccctaaatgcatcaaacccagcacaagcacatagatgctggattctccaggttgcatggcctttaacaagttctctaccattctgaccctgttttctctcctgtaaaatagggctaattgtatatgtcagaggattgttgtgaaaaatatcaataacggaagctacaggaatttcactaaaatgtgtttaattatagtaaaattaaattgatacataattttgtaaatcttcaatagtctttagctcaatattgatagccaaaaattaagcctggaggatagaaataacttcttaactctacagttggaaaagtgtgggcatagaacttgtctttgccttctagatcaggtctgtgttggtaaattagacaccgtgtggcctttcaacatccaggagcaagatggcaggagaatcatgccaacaactgaggtaccttgcaggaaatcaaacaggaagaaatcacccaatgggatcagctgggcaaacatgggtcaccccaggtctggtccctcaagtctacccaaccaaaccatatcatagtggatagctattatctttacctgactagcattcattgccccttctggtatgccctattccccactctcaatccctctgttttaagaatgcgcccacctccaccttccatctccaggagtgatatccacccaggtttgctcagtaagactatgagacctatcttcctggctgtggtgattggttcagaagcaacatgccaaccaacctgatccaatgagagtgagttctaggacttttgctggaactactgtatgtctatatataaaagagaatctatctttctattgaaagccaaaggtaagaagccaatatgatatgcatttgattctgttacggaaatccacataaaagaaggctgcccaagtataaaaccaacacagaagaaagcagaggtaagagatggaaaaagaaatgagtgaaccagtgacagcaagagactgaagaacatcatttgattgcctggaatcagctaagcctgaagagaagcctaaccctaagcttttcagttacccaagccatcaaattcccatccccatttttttggttcttaagcagcttgaaccatagttgtctcacttgcatgcaagagatccctgaagatacatgcagttcctcaggtgaagattgccatcagttaacagatcctggcacccatggaccctgggacagtcattctggtagcatcctctggtagagaataacatagtcaaatctgacagtcagagagtatctgccagcctctgcttagatatagcccactgaaagggagagatgattaatttagccttgatttcaaaaccttgtcttgtatattccattcagcactttttatcttcctgtattcccctggttcctctctagctgaataaagaacaatttttaaagcaaacatcttcactgtgtatctagcaaagctttctgcttcattggaatatgtgatttatttaaaaaattaaatttcccatgagacgcaataatttaaattaagagaaaagcttgtctttcttaaacttcagtttctacatacaaattgatgttttatagattccagaaactttcactgttatgaagatggctctcagttttcctgctggattcagattctcttcatgacttaaaacaacatgaggaggatgagtcacaactgtaagctggtgaaatgcagaaagaaccacctaggaattcaaatgtcagcttaagaaagacagaatggcttaaaaatcaaagatgagatgaagtggactgggggtctcgggaacaccaagtcacaaaatcagcttacagtcagagggaacttgcaaatgatctgattcaagatacaaagaaaggttttagttcttgaggactttttccagataaatatttgagccaaagcacaatataagaaaaagatgcaagtggaacagctccttcaagcagtgggggatgttaaggaaaagcagggaaaatcagctgagaatcctccgtcccacccccaagactcctgcaacctagctgagagccacagaactggtcctctctctccggctgttctccaacatcccagagccttaggtggggctacactaagaggaagtcctccaaggaaactctcaggattagaccagtctttttctgctagtggtctttgataagcctacatggtaaagagtgggattcactgacttatctgtagtagatattattaaatatgtctcaaagcatctcccccaccttctcacacccacccattagaacaggatgttatctacaggctgatacctccccactccctccacctcccttctaatacatggcaccaagacactgcctaggacctaacaagtgattggcccctccttctccaagacattcccctcttcctttttctcttttaagcccagagggcctgaccctctaacgcctgtcccagaccactctctccctccaggagcctgccaagttgaacacaaagtcctaccacccctgccctcaacacagacttctccaaaacaagtccacaaacaccattcaggatgattcctgctaagacccacagggtgggagtgataaaatttccagtaacatctaccatgatattacttacaatcctaaaagaggaaatgttctgtattacataaaacatgtccaaggtcctcctacaagtacgagtgaatccgtgcctggttcttctttgtcttcggatcctgccacctcatccctgtcgtcatctgtctaagttttgctttagaagccaccctcggtcaaaccttcactctcttacacaatgagctgggcatcctcagtttccccttcatgctaaaagtaagccccatgttttgtgcatgtgcccacaccatttcctcaagttcttgctcctaaaggtaacagggcctgggtaaggcacttcctgcagagatcaaaggagactcgttcacacccaggaggaggaatattcttcctgttctaccccatttaaccctgtcccctcaacccagaggtgtcctcactgtccagcaagtgcttcaggcctgcagttctgctgttaccctattttgaatctcataggtgtggaagcatgtgttggcggggaggggcaggaaggtttgtccgccaggaagaagaaacgagtgtgtcggtatgtgtgtgtgagcgccgcaatgacagtgctgccaccgctgctgctgcatgtgctgggtctttgaatgtggcatctgtcgggctcagtgaggatgacagatgtctctctgctttatgaacaaacaacacaggcctgtggggtgacaaaaacagcctcagcccaaccagagcggagaggtgcagttctctgggaataatcagaagacagcagcgtaggagtccagagtctaccacacacctgctcccctaaaaaagcatgttctcattatgaaaccttagaaggcagctcccacgccagggacaagtataagggagcctgtgtggcctcattcattaccagatgaaccactcattcagggaagtcttgaggcatgtccaggaaatggcgccccaaagacccagttaacccacagggtgagtgcccacggagatgggagctctgggggtgacactgttgagccagtggatcaagcttcaccctgagtcaaccctaattctgtgtttttcaaataaataagccaatcaattttcctgttcatttctgtatccccagcacctagaacagtgcctggcacacagtaggtgcccagtggacattcgctgaaagaacaaacgaatgccaaggcagaaaatgggggtgagaggcaaagatgtataaaaaaagaactaagcagagcaaagcgataagaagaatattaataatatgaaccacaaagacaggaaagtcatctgatttcaatacacaagagtataaactcattatggatgctgaattacactagtgatagtttaaatatttcttggaactgaatatgcacataagaagagcccatcccaggcttgaatgagtgcacattcttgtcttggagaaaaggaagaaaaatatataaagcaataggtacaatacaatgcaacagatgttctagaacaaaggcctggagctatgattccagggcagcctgcaaagatctcccagtggagctgatgattagcaggccttgaagcaaggatggaagcctggcaagaggcaggtcagtcatcacaggcagggatgacagcttccaagaactatgtcgtctgtgagcccaggggccagagagctgctgggtttcccagtctttccaggctatggccaaactgatgaagccatccttgtttcagtctctgattccttcagagaagaagaaagagttgagtctagcagagtctcactctgcctggacgcctgctgtaccaggagagcactccctccacatgccactctaaacagaaatactccccggagcacctgggacgaccggcatcctctgcacttccaaggccttcactcttcccagttttgcttacttcttctcatcttcccattcacttcccagatgtgtttctcgggtctccaaagggaaactcaggggagaaactgagtcaagctactttaaatctcctttcctacctggccctttccacagcactcagcccagaagaggtgctctgggtgaaacaaagcagcagtcggaatctctgcaggccacagggagggagggacgggtagaatcaaggagtggggcactagcacggaggcctgagcctcctcactgccaggatgagggagccgcaatgatctggggtactggcagctctgggagcctctgaatagtgaccctggggctctcagaagtactaggtcaaggtgtcccggtgggcacagctgggcttagtcatcaagacatgggtacaaacctcagctcagtcaccatccagctgtttgagtctgaaagttacttaatctctctaagcacagatgttctcatctatgaaaggactataatgcttgtcttgcggggatgttgttagaattacatgtgatgaggtctaaattgctcctagtacagaataggcaattggtaactcttaactactattagtgtagtattatcatgatcgtcatcgtcatcatcatcatcattggggcagacaaatctcagaccaggcctgagaattcccaactctgaattcagagccttttgctccagcaacagaaatgagaaggtaaggcctaaagtagaacaagactagaggaggccctgaacagtgctgggcgcccaaacagggacttcctcccaggaggcctctgtgccactggcctggggtctcatcatcaccgccagcaacagggtgactggctgccccctggattttctgcaagcaaagaacaggagggcagagcagaaaagcccgggaactaatgagattcagagagctcgaaaattagaggtgcacgaaaggagtttccgcctaattgctctgacacctcccactcccactgccgagtcactgcaaggagcaggcgagtgcaggagcaagaggggatccataggtctgctggtccaggtcactgctctctccaggagcactggctccagttgggagtggcccagggcctttctgcggcctggcaggacagggtggccactgcccgtggctggcccagaagagtccaccttgtgggtcaagagctgcccaggctgatatgtgccttaaaaagcgggaacgaaagcaaggcagcacacagcaagcccaggcacctcctcagccttgcaaatgggagctggtgatatgggctcaggaactgccatttctgacccagcccagacaaatgtggcccaattctctgttcccttggagctgagcccatttgtagccatgccaggcccagggtctccctcagtggctgctggcagttgatagcagctgtccttagagcctcagctgcctctcctgcgctgtgtcctccctaaggggcttccagatcggttgtctcacgcgaggctcccagcaggctggaggagggcaggctggcaaggcagccacactgcccctgcatcacagaggagaggagggtggcccactgacaggccagaggcaaactgagacccttccgatccattgtcccttccctgcacccccaagaacaatgacttagccccaggacacatccttaagaagagggcatccctaaataccaccagcccccaccccctatccccccccaccccccccaccccacacacacacacacacgatgctgggataggctgtgagacaatatggaaacagccagaaagatttgcattcaaatccaggttgtgtcacttcctgcccatatgtctttgggtgctttatgtaacccctctgagcctcaactgctccatccataaagcggagcatgactgggagggataaatggaatggcaagaggaaaacacagtgcccagaggacagcaggctttcaataaatgtgaaatgctctcagcatggccctgcctgacgtcctgcctcagaccccgccgtccagctcacaggacaagccacagccttgtaggacactagaattgctgccagtctgccttcagttccctttgttgtttaggagtctcccctggactatcagcttataagaagacatgtatccatcacaagggcctctgataaatctcttcacggaccgcttgcttatatcaagaggcagaacatttagaaaagacatagtgcctgctgctgtctgggccaagccatcccacaagcaggctgaagtgtgagagaggcagatacattccctttcaaaatgtctatggtcccctggtccatgatataataggagagatgcacagctggcttagcttgcgccgtctcccaatgcggacaggcacctgggagagccaagatcgttagccctccaggcaaaccattcaagtcctcgtgctgtcaaggtgacttacaatattgagagtagtttgagattgttaagaattattattattttttttttctgaaaaatacacagtgagtttctcaactccagtttactccagctaacaccacagctttactgttcctcttccaatcaatagtggaatgaaatgatccagttggaattccagttcaggccacagagctgacatcttctggattcccactcctggggattctcagacccaaaggcaaaatgggccctggtcatgggaaagtccatggctttagatgggcagaatctgcagccactgaggctgcagcacacagcagggaccaaagccaggaacagccaaggacactcaatgccactcctgccttatgccagccctcagggtgagtgcataagctcttcccataaaaatggcatttgcacccttagtaaccttttattcaattcaacttcatctagtcctagtaaatagaattacattacttccttgcttaaaacacttccatggtgcctatgcaaaaatgtaaaatactttctctggcacacaaagcccacatgctcttgccctcctctccagcctccttcatgccagtcactggcttggccatccaattcagactccctggcttcacttctccttccttgactgtgcgtagctctttcttgctttgtagtgagacatacactcctccccgtctttgtccagttaattcctgctcccttttctggtctcagctcaaatgttgcctcctcaagaaaaactcccctgactgcttcccagtacaatttattcccactcctgcccccttctctcctatagttccctgttctttttaaaatggacttgtcaatatgcatgacgatatgtttttgtgtttattgtcctcgctctctgaccatgtaaactctatgaagccagagagaatatcttattctctcgaccagtttgcacaatgcctgacacctagcagatcctcaacaacctttgttgaataaatgtgtccatttattcagttctccaatgtctgacttcattcaatcacttataattaaaatgccaatttttataatctccatgaaccataaattaagaaatcactgtgcggccgggcgcagtggctcacacctgtaatcccagcactttgggaggtcaaggtgggcggactacctgagatcaggagttcaagaccagcctggccaacatagcaaaaccctgtctctactaaaaatacaaaaattagccaggtatggtggtgtgtgcctgtagtctcagctacttgggaggctgaggcaggacaatctcttgaaccccagaggcagaggctgcagtgagccaagatcgtgccactgcactccagcttgggtaacagagcaaagctccatctcaaaaaaaagaaagaaaaaagaaaagaaaaaaagagaaagaaaacactgtcttccaagctgtgactggaggcttacattaactcatttatatttgtagttagtaacatcaccatttttaaatgagtgaaccctgaccccaagaagctaagtaaccttataagtcatagaatcagtaagtggcaaaaccataattgaaacctctggctcataacttctcacttttcctaccaaatgacacaagtggctacaacctgagtggccaggcctgaatgggtagccagtctagaactgccttggtccccagccccacagcacctgggacaagacccagagtggcatcctcctcctccacagcagaggagactacttaggcaatgagatgaaattggcacgtttacctgcctctgattaaacagagtttttactggacagcagttgttgaaataatttgggctataaataaataggaaccgggctagaatctgaacctgcttacaaagctagtccttttccatttgagtcataacaaatccaatccactcggggaaaaattaggaaacaagggggaaaagctttcagtttctgtagcattttaatgaaggattgattgaggttttatgcagcaagaagggcacagctggggagtaattgccaagaaaattgaggtgcaagagccatttacatagaagaatcaactaaggttcctcaccagtgctcaactgaaagcagtagcaattggaccaaatgacaagcatcacaatctcactctctagcaccccaccctaggaaacaaagccaccttgtcactgtctccttcaaaagtaccacaacccaacccaagacaggcaatggcaattcatgtgcatcctccactcccaagccttcagcaacctagatactttgtctggggaccttctgaagaggaggctttagttgacttcttcaagatcacttactaccatagacgatggctaaagcaggactgaattccagatgttatgatcctagagagtctctcaatcaatggtagaactctcatgcacaatcttctttggttgggggcagaggaggggtaacttggagcaggtgatagtgtggctcccgacaggctagccactttacaaggattcaccttctgtcccttcactatgtatcagaagctacactttatggccacgttttgtttcctcttttcttcctcttcctctttactgtacctccatccatccttttatagtgccgctttcaccttggtgtgtgaacttgccgctgacttcccaaatgagttctgagaaccgatttcctgtgctttgtgctctgtgatggttcagcccactcatcacacctctcatggagatctctggcactttggtgggccctacttagaaaccatcttcctccttgatccttcactaacaagttctataatcttaacctcccagggtctcagttatactacctgcaagatgggcagaagaattccagcctagatccccacacaaatgtaggaaatccaaagacaataatatataagggcttggagaaaagaataaaactcagactgcagtgaggtgaataattcagtgcatcctccttatgcagctggagttaattccaaggaagcactttgcaaattctcaggtactatgcatgttctttctttctttctttttcttttcttctctctctctctctttctctttctttctttcttccttcctttctttctatttttgagatcacgtttctgtcttgtcacccatgctggagtgcaatggcacgatctcagctcactgccacctccgcctcccaggttcaagtaattctcctgtctcagcccctggagtagttgagattacaggtgcctgccaccatgcccagctaatttttgtatctttattagagacagggtttcaccttgttgaccaggctggtctcaaactcctgaccttaggtgatccgcccacctcagcctcccaaagtgctgggattacaggcatgagccaccacgcccggccacatgtgctttttaacatttttattatttcatttttggagtcattattatttttgttacaccacacaaattgcaataacattaagagattgagatgatgatggtatgagggtggtgttggtgatgacagtgatgatgacagcaatgttgctgatgttccatagtggtaatggtgaagatgatggtgatactggggagatatgatggtggtggtgatggaagtgatgcttacattacaagtccactctacacacacatgttctttacaaatgtggatgaaccctatctcctgcatggagtgggcagcacagattgtggaggaagctgttttccttccctggcatcttctgttcttggaaatcaatgaatgtccttcattattttccccatagttcctaagaggatactttcctgcttctgaaacattcactatttctataaagtcagtttgtcttcattctgtaagctcctcagcaaccctcactatttgccatgatgctggtcaccgggcctacaagacatagatcttgtctttgaaaagcctgtgttcctagggagagaaacatctgaaaagtgaaagaacatgagagcaaaatagcatgcatactgcattagaaggtgcaccctcattccgcacgggtgtgtcagggactggcagggtcggggatggcttccctgggaaggtgcctttcaagctggccagtgactaaggggtcactcatcctccagggaatgggtggatagagagcactctaggccacaaacaaagcagagaatatacactgctgtagggtatgatctgagggatatgggagatttcaggggaaagagcttactttaagttttttgaagtgataaaatatttgaattttatcttggaagaactatggatccgttaaaggtctctcagcgtaggaatgaaatgagctgaatctgcatgttacgatgtttcctctgtagagcctaaccccctccacttgtgttcccaagagccccagcatcactcaggagcttataagaaatgcagagtcccaggccccattgctaaacctcttgaataagaatctgcacttttcaaaagtttcattttctaaattactatacagtaaatttaattttttatttttggtgtaaagttctacgaatgttagtatatgtgtcaatttgtatagccaccaccataatcaagatacagaacaactctgccccaaaaactatcttgcattatcctttatgatcacacctatcacccctacccactaataaccactaatctgtcctctgtcactacagttttacctatccaaggaagtaacataaatgaaattgatataatatgtaacctattaacgctggcttttttaattgagcaaaatgttgttgagattcatccaagttgttgcttttatcaatagttcattcttttttgctactgcatgtattcatggtaaggatgtatcacagttgttttagccattcacccactgagattcttcctagttttgggtaattatgaatagagatgctacaaacatgtatatgaatgttttttctgtaaacttaagttttcatttccctagggtaaatatctagacattgaatttctggtaatatgctaagtatatgcttaattttataagaaaacttctaaactgttttcctgaatagcaacattgttttgcattcccattagtaatgtctgagagttccagttgccccccatcctcatcactacttggtattgttggtatttttatttcagccattataataggtgtgttcacatctcatcattgcttacacttgcatttccctaatggctaaagatgctgatgttctttttctgagcttatttgccatccaaatatcctctttgatcatgtgtctattcaagtcttttgcccattttccagttgggtagcttgttctcttcctgttgaattttgagagttctttatatatcctggctataaagccttctgtaatatatgtgatttttaagtattctctcccattatgtagcttatcttttcattctcataatagtatctttcacagaataatagtttctaattttgacgtgtctaagtgatccatttttcttttgtgaatcatctttttggggtcatgtctaacttacctaagttcagatcagaaagattttctcctatgtgtttttatcaaagctttatagttttacacttatatctgtgatccactttgagtcaatttttgtataagacatgaagtttaggttgagctttttgttttgttttgtttcatttgcccttggatgtccaattgttccaagaccattgtagaaaagactccttctccattgaattgtctttgtacctctatcaaagcaattgaccatatttgttgtaggtctatttttggactctagtctactccattgatctatgtgtctatccctttgccaatatgacactgtcttgattactatagctttatagcaagtgttaaaatcaggtagggcgattggtgatttcttcaaatatacacttctttttcaaaattattttacctattctagttgctttgccttttcacataaattttagaaattggtttgtttatatctgcaaacagtcctgcttagattttggttggagttacattaaatctgtagagaaatctgggggtgagctggcaccattactaggatgagtcttccagtccatgaacatggtatgtcttgccatttctctaggtcctcagaatctgcatcttaacaagaatcccaggtaatttccctgtacattagagtctgggaagcacagctctagagtggaaatgacagtgaagtcatctgggaggatttacaaaatatggaagcctagacctcactcagaccaactgaataagaatctctgaagggggacctaggtgctggaattttttctatgtcttgtaggtgattctaactggcagccatgtgtgaacctctactctaaacccagtctgggctcttgtggctctggccctatgctcattaaatcaatctgattaaggccatcagttcattccttttcaaccctagatgtatattggaatcctttgaggatagaggttacttcaatgagaattttcaagaaaaaattctagttgacagattcaccaaacttcctctgaggccccacctatatttgaggattacctttccctgcccaaccccaggagctagaacaacattccagaagttttaactctcaactctaaaaacctgctctctttttggaagtctctctacaagttactgaggcaggaggagacagaggagagagggaacatgtgtgcacacaagagaaatgtccaattgaatgagtctgatcaataagatctatgactcaaaaatacttgcttcatggcaagggaacatcttttgctttcatatccatctcacatacctgctgagtcaaggaaacagctccatatttaggagaaaaatcctcttctaatctctaaatgcaatcgaaggttttctatgtctttttctgtggctccttggaaatgttaaaggcatgtctcagctacagcaaggtggggcatgacatattgccccccaaaatatgaaccaattgaatgtcgtctgaagtcagctctgtttctgttatcttttaatggattttaggtaaagaagtgttgatgtagataaaatagatataaaaccaaattcttctgctttggatgtgcaccaaccccagcaggctaaaaatagattcaactgcatcaataatatttctctttaaagttgcaggtcctttgggggtttggaaacattcagagaggataaaaggggagaaagatatgaaaacagcagaagctgcagtctaagcctccaggtgggggccttggggacagccatgctggaatgcctgatttttacatgtccaagtacctatttcctaccaaaaaaaaagcccttccacatatgataagaacacatcttttcttgcagggctgtcaagttcattctaaacacccctgccgctgcctgtttgagattgatgcctctccaatctctagctctttgtttgaaattaaacatccaaagacctttagaataaaaaaagtcaacatacaaatgaaatgcatttcaacatgcatctcaactgcagaaccacagcatgttgagactggaccaagcaaaccctgaagaagtttcccctcttgctcctctgtggtagatgacctatccaagttcacacaacaggtaacatggagcatgtggagagactcagcataggccagtgcagtagcggggtctactggaaaagacttggcctttgaagtctcattccaatcccagccttgcattgaccaactctgtgaccttgaccttgaaaaagtagagtcacagtgccctctacttcacagggttgtttggagaattactgaaaatgtgcacaaaatacctgatacacagtggggcactcagctaacaccagtcattcctgtaatccaggtctcccaacttctagtccagtgctctttgcacaacaacaccatatgaagactctgagctatccaaataagtgcacttgaaccacaggttaaatccccttcctctcatcagaaatacaggctagcaccgcccagcgttctttaaagacagccaggaaaacaaaccaaattcatactacttacccaacactgaacgagacacgctggctccctttcctttattttgtttcccttctatttgtcctgggtttgtggttctcgggcaaggtgaactctgctcagtatgatatgtgacccctggccacagttgcatatggccctgcctcagttgctgcctgctccttacttgattctccaggtccacactcctttcctgtgccatcttcccctgtggcacctgtgtgtaggaatcttcaacagctgcaccgccaacagagaagccacaagctggagccccacaagtttccccccaggccccatgcatgggtcagcagtcttgacccctgggctgattttaatattttaattaaattgacaacatgtaaaaaatctggagatttcacaacaatgcagatttctgacttcttttgacaaattacaaactggccaaatgtccacagctggccagagctgtgaggcagctgctcccttcatctggaaagactcttgctccactggtcaaagtccccaccggtcccctcattgcaacctcaccattccctatcaacctctgagttttccacccctgttatgatatgcacttccagttctccagctggacactcaagatgtgtcaccacatggcccactgcacttattcaatctcttctcctgggaaccctggaaaatctctctgcttctaggctctgctgggagcaattcccctcctacaatgtcctccttgctcttttatttatccaacccaatcaagagtatctctgcttaaaaaattcttgctgaccacccaagccacaaagagctctcctttccttaaagcatggagtcaacagttatcttacctaccttcacatagttggttcttcctgtttgcacatcctgtttccctagctaaattgtaaacttcttgagttcacatttgtttgccttccccagaaggcagccacagactttccaaagggaaagttctgaacaaagattaattgtttggtcaggagctatcaaccatatcatcactcagtgcaagaccagtctctccagcctcttttgcctccactccacttcccttgttcccctctcaaatccacccaaacccccatcctcctggaatcactccaaaaggactagaatttgtttcctgttttgcccacgattgttcccatcgctgccactccccagggctaaacacagaacctgccacataacaaaagctcagcatatgcacattaaatggaaagtgccttactttttagtccctatatcttaacatctgcagttcaccaggctgaccatgcccttctcccttttcaccaacagatctacgggtcttggaaatcccagttcagtgttcctctctcaatctttttctcttcctttactcagccaagtcactcctctctctaggcgccgcagtcctttgctcttgcctgccacagccattgccaaatgttggtgcaattgtttgcccacacctgtttttcccttggatgccaaggtcttccggatccaggattgtgtgatcttcttccatgcgcttgcctggttccccaagtcataactggacataattagtctggtggagaaggcaagtattatggccctcatttttccaatgagaaaatggaagcaaggcaccaggctccctgcatgcagcagagagatggaagaggaagagaggagcagcttgggtgagaagacttggttctattagcaggggtcaagcaatggaatggaaatgtgtcatgtcctttcaaggtcatctgtggagcaatgtttaacagcctgcccaagaaatatttaattacctagaggaaagtaagtacctttgttgacttgatatttgctaccaactaaatagccagattatgtgaagttacacattaatgtgtaggattttgcctagtagaaatacaaatgttttctgttcaggagaaaagataatctcaaagtttattaattgactcccgtgtaggacattaaccagttttgtttctaatttagcaatctcattccaacactcttcctccagtgcctatgtaaactcatgctgccatcttgttggtttcctcattaatgagctaaatgcatttttgacatgtccacattctagatttgtatgagtcacaattttaactttttgaaaattatactttgccacccaggtgccaccaactctgggagtgtgagcaagtccctccctcccctcttctggactcagtttcttcaacagtaacatgagggcgtaggtctgcatgggaaattacaagccccaggaatatttgattttaagcctgaatcttaaaaagaataatttcctcatagggttgaacatcttacggagttattttccaaaataacaacaataatgggacagtgcttcatacctggggctaagtattttaattctcacataatgagatggggctattgttcctagctctattacaggtgaggttaggaaagctgaaacagtattttttttaacgaggagacactatgtttgtccttccactcatgtttccttccattcttcttttcacctgtctggtcatccatgtttccagtcatccatcccactgatgcaaaaagaaggtggtttccattttcactctggatctatctaattgactatttaattgatgtggactttagtagaggcagtgattgcttccagttggtgggcccaggaagactgtgaaaaaggtaccactttcagcttgaccctgaaggttcaagcagaattatttagggataggttgaagaagcatctttgcctgaaggaaccatggcagggacaccagaagacaaaggagggagacatgcacagtgaccagtgggtggttatggctgtgggaagggtggataatgggagatgagatgaaaaagattgattggtcttggcatatgtcaatggctgattgagaatcttaagtttccttgatctgaagccctgtccacaatcacccagactctgagtacttcatgtggtagtaagaggcagagacaaacccttccccaggtgccctgatctggccaagcctgggcgctctgactaccagagtcctgaactcttagaagggagagctgcaaacaaccatggcgggaatctactccagcctcccttcccgaacatgtgggcctgagctaatttaagctagtctgagctcactttgcaagcagttgtcacaaggtgctacatcaaaagactcccaaggcccaaatatttaacaaccagaacactccctccatccatcagtttggtaattctatccacacaaaaaaactattggggtttcatttctggcctgctcatttcttataaacatgccagggccatttacagctcacaactcactgctctctaaacatttacacatttctccctcttaacacatccttggctatttgattaagtagtagatcacaggggatggaaggcaaggccttggcatctttgggttttctccaaacctatcttgacatgggttcaatgccagcctccccttccagtaaacacaaggattattgcactcctgggcacagacttgctgatgccttggtcttttctatcccttctcttgcagtttctttaggtaggagggaatacaaaccccaaaaacaaacagacatgagtccattttaccagctgggtttaatgggaaagctggtagggttccccatgacccctaggactgaatgagtgcccacatttcacaacaccctgattccagacaggaagcttggagaagtatctatatttgggggaaggaagctgccccagacacagcttcctggactgttagcaaaggaatctcacacaaggcctaaaccagtttccatacaacttccttgccttttgggaaggtgcaatctcacaggactggtgggacttacccaatgcagtcatccaaaaacagttatggccaacacctaagtgctgagaaaagtcaagaggaagaggaagccccaagggcagagaaagtggtgaaggtcacagaaaaggcatggagctgtggcaccattggcgggggacagctagagtccaggcacagagctaaaactgggtatgagcaagggtaggagaggggacactgctgaacacccacaatggtcctgctcctgttggctctgccttcaatctcaaaggcaattatgaataaaggaaagcacactgccttcagagtccgacctaagtttgaatcctggcatctttcccagctggccgtattacccctaggagctactcaacacttcagaacctcactttcttcttcagcaaaacagaggtgcaggtatatatctcctaggagtgacaagggaattcacgcggctgttaatgacctggtgcctgcctggggctaccaagcagccaccacaagagtcctccataatagcatccaccgcactgcagtcagggcaacagcactgcaagcacttcatggacagagaccaagcctttccaacttgatctgccatgtttcaacacagtgcctcagccattgagaaaatcctgtgacaggcacagacccccttcaagaaggacttgctgctcagctcgtgagagggttgtcagcagcttcttcagggcttgctcagttgcagagagctacctggccagaggtcatgcccttcaggggcagcccacctcctctgagtgatgggagtgatggaataaaggcccatgtcagcccatcccagcactcattccagcacaatgctggcaggccatcttggtgctcttggggctggctgtggctgcatccagcctgcatcacgactcaacctctgcacagtcctgctgccttcccctcctcccgtgggtatgagcctccagcacactcaacttcgtgtcagagcttaccttccaagaaccctacctgcaatgaacttggtatttgttgatgagtaaatgtctgaaacaagatccccaatcttctaaatccagagttaaaactcagacaggccacggtccttggtcattctaggtccaagaggctcttgctgctggcatggccaagagatacaggtaagtaaaacagtatactgtggtgctatgaccacccagggggctgccgtgtcccactcaggaaaatcaggtacctagttggcttccaaaagaggctggggaaattttaagttgaggttgggctctgtagaccttctccaccactaaagcccccaggtttatcatttcccgggagaataggtcctgggggagagggggagataacaatggaacacaccaaaagggaaccctgtaatggaacagtgcccactaatgtttattttatcccaggagtcacagaaggcctggaatggctgcgatggagataaaggatgaagggtagtcccctcagggtgttatccaaaaagtcaccttggaagaggaagaaactcctaccaatatcagaagagcaacaaacatttttttttctagaagataagtggctaatttcaaaataattattttatcaactgccacataagtttttttttttttaattcattaaaaaaaaaaaatgaggccgggcacagtggctcatgcctgtaatcccagcactttgggaggccaaggtgggtggatcacctgaggtcaggtattcaagaccagcttggtcaacatggtgaaaccccatctctactaaaaatacaaaaattagccaggagtcgtggcgcatgcctgtaatcccagctactcaggaggctgaggtgggagaatcacttgaacccaagaggcagaggttgtagtgagccgagatcgtgccactgcactccagcctgggtgacagagcaagattccctctcaaaataaataaatacatacatacatacatacatacatacatacatacataaaaatgaaatgcttcccttttcaaatgaggagtgggaacacttagattacagtgctaagttctttttgtctgtgaggtaaggagaagagcctgcgcctaggtgaccttggcctggtcagagatgctgggacagcctggacgtgggaaagaagggatctacgcaggtctgtccacagcacattccagggcagcttcctcccgggctgcttctgtgccagaacctgctggcctcaggagccccagctcacctttcactgaccttcagcccacaggagaacagcatttcctacctcccccacctgctgacaaggcctctctctttcccacgccaaggacaaagatgacctctgggggattccttttagctggctcataaaaggaagagagatgggccaaagagaaagagctgctgggtccttccccaactagaacatgggaaatgatgattttccagtagggaagtggtggccaggcaggcaggcgtcgactagatgggtccctctggggtgtggtggaaatgacctcaacttcaaagagacagacttccagagaaggctggcattagcatcctgatctgctctactgagaatcccaagggttttgcggaactcttgctgggccatgaggatacagtctcctcctgaccccaatcctctaaccaaagcagctaggtttcagttagtgtacacagagctccaggcctctaagagtgtgaaagccactgcctcaggagatatcccttgctggagatcctgggaagtagaggctatggaggcagaccacttaatagctgtgcaaccctcagcaagtcattcatccactctgagcccgagttccctcctgtgtaaaacagcagttatcacagtgcctagctcctagtctgggtgtgagagttcaaggtgaggccaaccagttgcttcactccgtgcctggctcatagtgagacctcagtaaatgtgagctattttctttcaatgaatatttgccctttccagcatcacaaatacatgagcttccaattctagggatacaaagacagaggggctttatttctttcaatgagttcagagaagtccctagcacttaaactgctatacactgagagagtaagccatagttctgaaaatgctctgtgtgctcattcacctgaagcagcactgggggtcactgcagcctcaggtgccaccgagccgacaggccatgaaaagaacacccactgactcactcatctgggtggaatggtttcatggggacccaggtgaggtggtgaggttgctgcttttttatgtattggctttttctgcctccccaatgccccacttccgtcgcaaaagtgtctgagttctggagcaaaggctcagctaggaaaagtttcagatattttctttgtcttaacccttcagggagaggaaggaaaatctgtctcttgccagggtgagggccaccaagcgggttagctcactctgccacattctgcattttctaccttcaacacaatggacagtgggatgtctctctcttgccatatgcattcaagagaaaagccctggtttgggtggggctctggtttgggtggggtttgcattgggtctacagccactagcaacttgctgtagtcaaggcaaatgacataagctctctgatcctcagcttcctcattgtaaagagagctcttagctccaggtctcattactttcagggtatttaggatgtttagatgccaaataagacagcagaaggcagagcaccttgacaagcataaagcactgtatgcaaacataaagcatggtgcaatctcacaggactggtgggacttacccaattataaacaaatttataatcacatggcaggaagggtggaatttcaagatagaattattattcattgtaagatgacttgtgtaatattgtaaatgactgctcttcaccccatcctctgattcaaattaaaatcctcattccatggcccctacatgtacgctcattttcactgttcagttacaagcaacaagatgagacattttgacgcccttggtaattgtctggtttctagaagttcttggttcacaggcctaagcatgtttcatttgatgtttggcaccatagaaaacagtgtatgtttaatgatttctgtgttaaactgaataatgaataaccaggaaagacaacagaccaaatagcaacttcttgatacacctgcttgacggaattctgagcctttttcccactctatcaaggacaactgcctaatggagagtcagaatatttttctaatacaaataaagtaaaaaagcaatgtaatgttattatcttttaaagacagaaatactattaaatcctcaaccatttttaaattaaagcataaaaccctcttctacccaataagcaataagaactcacttgaattccttttcacaggcatttaagggatactaatgggtacagacagaagagggaaaagtacagaaaggaaaacagcagataaatatatagaagcagaaaacaagagtaacagaagagaagcagaagagactaaggaaggcatctaggatgcagttgtgaagagaaaatcagacatatgtaggcagaaaagaaaacaatcaaacaaacaacaataataaaattagaactaaagagaaactttcttaaaggaacccataattttggaagcttatcagtagattttaaaagtagactacagatttatgactacaggagtaaagggtgtgttactcttagtaattgtttccttaatgacataaaatcacatcaagactatatccagctcatgggccagcagctccccatccctgccccataatgctgcactgtattatgtttcaatacaaaacatttggtgtccacttgggtcagcacctccatcagactgccatcactaagggaactgagccagcctcccacgtcagtttcctcccctatgggctccactgaatggggatgaatgcggtacctactctcatagtagggatatgaggattaatgaggtgatgtagaaaaatcacctggtattgtaggtggcatttagtaaatccttcataaacactagtgttcattattagttggggttacaaatagttactctcagagggggaaaaatgaatgaaagtgtgtgaacaggttaaacaaaatattttggaaattttatgttgtcgtctgaaagttctttcatgtgcatctaaaggcatcacactcactgtcaccctcttcacatggtgggtatcaatataaagaacattcttcaatttctgcttgactgctacatctcatttctgtctctaggtttccactgagccctccagctcaaggggcctccctccgcatgagtcgtctttaggaagcccagcctggtctctaattttgagaagcatttcccttatttcaggtcttcattcagccagtggttcaaccactgaaccacttcagtttccttccttcattttattcacaaaggaatcctttcatctacagcccctagctgggctcctttgaagagactttctcttcttgcattattttcttggtcagccttccttaggaaggaattaagacacatttcaggaaacgggcagaaaatgttaatccttctctccctcattgtcctactcataaacgcttactccctcaaatgcacccataaataagctgtagatccacatctggttctgagcccagcacatagtaggagctcagatgaatgatcacgcctgacttctcagccttgcttctgccatcccttcccctgaaaaatctgctcctctctacttaacctagtagaaccctcatgaaagctgttgtccctgttgaaggaatgatgccccaagcatccagcgtgtctgctgtttacttcatgcaccttagtggatgtggtgaaatgaaatgacttttccatttccaaagagaaagtgcaaagtctccaaacttatgacctctttctcagaatgccaatatttacagcttagccctgggcaaccctgtgcttttctgaccttagattcccatttggagtggaaatggcttttctatttctccccaaggttctctgaattagatgaccaaaggagaacttacttctaccaagatgggtctatgagacccattcaggctctcatccattcgttcaacagattcattcattcagcccctactgtgttccaggaaataagtgtcaaccatacaggagtgacccagacaaaaagccctgcttttatggagttagtttggattttagtggagacaggggaagatagatgataagtaaaataaataaagtatatatagtatattagagaattataaggtttataaagaaaaaatgaaagatacaattagtagggaatggggataatttaaaatagggggaaatttataaacataatggaaaatatgcatgtaagtaaaattccttccaaaaaatggaatatttaacactaacttgcggtgtaaacatgaacacatcatgggctccctccaggcctcggtttccttctcggcagtataaggtggaactacaaggtatctctatggtagcttctggcactgaaattctctttctctacccaatagatagcaatttgaattaacactagagcctgttgggacccagtgattgtggtctaagtttcaatgactttttttttaaatccctacattccttggggttcccagcaatgtctccagtgggctgctggtccaaattaattgtgagagcaaccacaaattcccttgtttatatttttgaattgttgacttagaatcagttttaaatctgagcccttcttccccacagatactctcaaaacagcctcctgataggcactaacccctaagaaggtcatcaagtggggctctgagagcaaggatgctgggcaacccggcttccaatgccacttatcctagccacatgagtactcataacaggcttgacgtcaattaaatcatactggccctgagaggcgccacccaacaaactgtttcttcttcgtggactttttgttccctctttatttattttccactgagctacaacaaggctcaggaggaggcccttcatctaggaagagtcatcttgggaccatctagggaggaaaaggcatccatcaggcactcatcagccacctctgatgaaaagcttcctttggggtaatttctctgcaccaccgagtaagccttctgcctgctggaggagctgtggtgagcatgtgaagggaggttctgaaggcttcagcagcagccaccagtccccctgcagcccctaatgagaggtgatccttgttcaactcctgctatgtgctagacacattctaagcactttacatgtattaactaacaagtctatgaaacaggtgttatcattattcccattttacagatgaagcaagtgagacacagtgaagcagcttgtccaagatgacagtttgtaattggaggagaagagcccctatcagcatcgctgtccagaagaaacataagacaaaccacacaggtcattctaaattttctagaaggcacatttctttgacacttattttatttacaactctatgcaaatttaaagacaaataatattccaagtggggccgggcatggtggctcatacctgtaatcccagcactttgggaggccaaggcgggtggatcacctgaggtcaggagtttgagaacagcttggccaacatggtaaaaccctgtctctactaaaaatacaaaaattagctcggtgtggtggtgggtgcctgtaatcccagctactcaggagcctgaggcaggagaatcacttgaacccagaaggtggaggttgcagtaagccgagatcacaccattgcattccagcctgggagacaagagcaaagctccgtctcaaaaaaaaaaaaaaaaaaaaatatatatatatatatatacacacacacacacacatacatatatatacatatatacacatatacatatatatacgtgtgtgtgtgtgtgtgtgtgtgtgtgtgtgtgtgtatatatatatatatatatatatatatatatatattccaagtggaggaaagaagttttcagattgctctcacttgtaactcccatacattaattttcttgtacatttttctttaagattataatgttgattgcctcctaacagtcatttccatccccctccctcattcagagaaccctgattttgttcaggggtgcaggtacctcaccaaaactgatgctggccccactcctgggcagacctcgattagtctgagcaagccctggtgctctcattcttatgccaacaattggcttaggaccgacctgtgactggttcttgacctgtgaaataaatgtgcaggtgtgctgggggcttctagaaatgtgggccagactgctgaagaagaggcctggagagatggttgcttaacctcgagatttttttttttttttgctttctttttagtatgataaaatatacataagataaaatttaccatttaagtaatttttaagtatacagctcagtggtattaagtacattcacatggtcgctcagccatcaccattatccatctagaaagcatattttttaaaagtaaaaagaaaaaagtgaaattaattttaataatggagtttaatctatacaaaatattatcaataagtaatcaatataaacattataataaggtttttttacagtctttttttgtactaaatttccacttacagcattgttgcttttttagagacagggtctctctggagtgcactggcatgatcatagctcactgcacagtccttgaactcctggcctcaagcgattctcctgcctcacctccaaagtagttgggactacaggtgtgcactactactcccagctttacagcacacagcaattcatatttcagatgctcactgaccaccggtgttggactgcccaggtttaaagtttctcaggcttgtgcgtgctcagccagctcatgggcatctccaagggacagcagcatgctgtatgtttatgaaagatttgtgcgtcaccatcagctctctggggcagtttgcgattcaccgcaggaccctagatggtgtctgactctaatggttctagatcagcctctctaacccccgcggagatcactggcatcacgctgatggacaatacaagatctgaagcctaaatgagagcttttcctggtggagcaaataccgtgcctccatcacccagctgtgatttcatctcccagttgagaacatgacctcaatggcagaggtagggacaacacctatgcagctgcacaggcactcccaggttggaccaataataaataaacacattcctacttggaaagagggcagcatgtgtgcagggttgaggcaagccgtggttgccatggaaaccagccagcatcactccagactttttccctggtgctcggatcattggtggctgacgaagcccagtggagaggcattgttcctgtacttatggaaaccttccaaataggcccattatgatgaaagcacatcaaagagggaatgatgacgtacctttaccatccatcgtcacatccactgtttgtcctgggtaatacccaaaagagaagaaaataaagccactcttgccacagagggaaataactggagagcactgaggtatgacactaggggtagcaaggtggtccccaaaggggaggcaatgaaactgccccatctcaccaccatagtgaatgctcgactggacaaatggttatggcttcagggatttgctacctgcccaagctgacttacaactcactttctatggcaagcctctggtttgctctctttctggagccacgtatgtttgagatcttcccattcattcattctttcctatgcccattcattccttcactcattcttgaatgagaagcaccatggtaacatgaaaacagcctgggtcatcgagtcatgagatcccagatttaaatctcagttcagatgcttattggatgtgtgatctcacctaagctattaaagattctctgagccttggttttctcacctgtaacatggggacaagagaagaataatgtttgccacttgtcttctacacagtcatactcaatgtgtttatacatgatttatatctcattccattttgatcaacaattacccaacagagagcctggtctctccagatactcaataagattattgaattattgattattgaataaaaatatgacaatgtgctttcacatatatttcttctctctctctctcttcaaatttcattttcacagcaatctggttcaaggttgtttcagcccagcacaggacaaagaggattataaaattaaaccacatgtttctgactctcagtgaacttacagtttactatgttttattaacaatgtatacaacacttagtctgccccagctactgtactaagtactttataaatattaggtcatgtaatctgcataataaccctatgaggtaagtactacgattgtcttctgtcactggctcagggtcacactagtacatggcagaacaaaggtcaaactcagccagtctggctctatagcctgtgctcttaaccactcagcctcattgcctttagagtggataagtcacattcacaagtgtatgcgaatactctccaagactgatggattcagaggaggaaacactatgcactgcatcttaaagatgaggtaggatttgaacacatggagtgcatggaggagagcagaagaaggacaggttggaaagaggataggggccctgaccatttgcttgaagtgtttgggctttagaccttggaaagccactgaaggtctctgagccatggggaaacctaagcaaagctggctttggggaaaattcatctggcaatagcatgaaagatggactgaagcggggagatgggacaaatgaggagagtgacatgtagctgctataatgagtgaaggaaggggtcacagggcttaagccaggacaatggaaaaagaagcatcaagggcaaatccataggacgtgcctcctaccaggatgtaatatgtctccccgagtttcccaccaaaactttcacatcagaaacaagttccaaggagcactcactgggcactttcgtggccatccagagtggcacatgggtgctctatagcactgctttcctcaaaggaaacatggggtcatcttgagcagctggaaacactggctgagcctttcctagttgcatgcagccatttactgaggccaagggggcaaaatctaatcctgacaaagaatcctggccacctcaaatgcaaaagatagccaagtacaacgaaccatagtcccgtttgttataatgtcctataaatcacagcctaggccttacagttaatagggctttctattccaattcccattatgctggaaggggaagaggaagaattgaggaacgaatgaggagtctgagagtgagttacggcccaagaatatgacttgtcagccgtcttccaagctctaccaattgcctgaaattctctatccagtcgtaggtttgcataaattcctggagaaggctttgtctgataccacagtgaaacagatgccagggtgcaggcacaacaggtagactcataaaactggtaaagagaactttgctttgacaaaagctggagttttccttgttatttatctttcctatttgaagccttgaaatcccattttcatcttgatggagatgataaactcttagaaaacttttatggctcccaggatgaaactgaggactctgcctctgctccccactgcaattctggcaggcttttaaattcaagtcagggcagaaactgtttttggtcagaggcaaaatgtatttatctctgtaagcacagccattaagatgtgagcatgaatagctaagagaaagaacattaagggagaaacaggaagaaatagaaggtgaggctatgatggaaggaaatgatgacgcatcaacccccaccaaaagctttttacagtgccgggggagtggggcacagggaaaggcatctgcagcgattgggagaaagaacccgggagtgggctgaggggaaggctttgcagtgggagggctgtgatcagcgtgtgcttcatgcaaagagaattttgagagtggacataacaaacaggaaaattgtgcttgcatttctgtttgtctgtagaatcactgtggctctgaaatccaccccctctgctctccaaacactaaagaaagtctccagatggaaaaatctgaagtcaggctgcaatatgaaaaaagaaaagaaaaagaaggctgctacaggaagctgacaaatttgctgtttctctgaggtctaacctatgcagctggggtatcaaatactagacagggtcaggagacatgtctgaaactgaccaaatgaccttggacaagccccactttaatcacacataatgtaaactttagggaatgtgacctagaacaggtagctaaggcacaaataacactagtactaccaccctccaagctggcactcatggcaggcatcattagtcagtcatggaattgttcttttcttttcttttcttttcttttctttttcttttcttttcttttttttcttttctcttttcttttcttttcttttctttcttttcttttcttttcttttctttttagatggaatcttgctctgtcacccaggttggagtccagtagcgtgatctcggctcactgcaacctctcactcccaggttcaagtgattctcctgcctcagcctcccaagtagctgagactacaggtgcctgccagcatgctcagctaatttttacatttttagttgagacagggttttagcatgttggccaggctggtcttaaactcctgacctcaagtgatccacctgccttggcctcccaaagtgctgggattacagacgtgagccactgcacccagccctcggaattctttagagcagagccattatgactgtttgctgctgaaccttaaatctttggccaaatattctctgtagctgctactgatcaatcagaatgaacccagaagatgaaagctgatgaaagatgatgaaagttcaccattgctagacttgatctcttctaatccttaaacactagagccagataagattgcatgtcatgtgtaatctcattatagacatccttaactaagtcctaccttggttttcttttctctttggccttctttccaagtcttagcagccaaggctgtgaaataagaactggtatgaaggctcttcattcaactccacatctgaagctctgaaagtgaccttgtgcacttttcttgagcctctttactttacgttcccccattctgccacaaagctcctggtggggctggtgtctcctctactctcctgctgatttcatcaaggtaaagaattctattccttttcaaatgctttgagatcatgggatagaagacagcctggggaagttcaaagacgtttaatcattagcctcagttcttttgaaaattattaaagagcccagaattagaaattcagatttcctccaaatccctgagaacaaacaactctcttgtaaatggcttaatgtgtctgtttaatgtacacaaaattatctttcaggaaagtggattgttttttatatcattttgcatctctaaaatataccacctatggcaaaaggattgggattcaaagtctgacaaaatctacagcagaaataattagcaccagaggctgtttctgagagttaaatgaaagagaaactggttatttatttatttcttttctctctatctgtatctctccatctcagccccgggaagaggaattgtatctcttggtgctagaagggtggcttgctgaattgcctttacaaggtttttttctgtaagacaacaactgagcccccaacacacaactccctgtgggccgcagtgctatggaaacagctgcagtgctccaactctggggaaaacaaccagataaacccactggtttgcaaactaggcacaagggcagaggaatagtgatgttttctaatttagcatccagggaggcaagggggagtctttgcttaaatcatgttaatgaaattggaaacacttgaaatagcccattgagggtctgttgcccctgttttttaaagttcatctaaaagttaacctacaaggaattttcatttggggaatttctgcaatgtcaactccactgatcacccacagtgtttaacacccttgctataaatttgggggctagcttggcagctcctgccacccccctgagtctgctaccttgctccagaaataaaaaatgactttggccacagtaatgtttcctcgatcctcagcccctcctgggggcctccggcagtcattattttaaataaacatgccttttattgttttcaggtacacagagatggaggcgcttctacctctggaggagggatggactttcaggggccccatgatttgcagcagttcagtcaaaagcaatacaaagagcaaaggataggggctgttatctcacccaagagctcctcaagcagaggatactcaattggaaaggaggctcttccagtcaaatttggggctagtggggtcaccacgtttgataccaactaggaacaacatccccttagaggcttccaactgaggaaggttccaaaagagagctccatggctgaaatgattcaaaagaagccaactccttctcattgagctggccctttggaatatggccccctcctcccacggcatccttccccctgcccagtgcctcaggcccatctacatgcttctacctataggctttgcttcttctctagaaaggagcaaagaaggaaaagaatcattggaggtgagtcaaaagcaggcaccgtaactcacggggccttgtaagccagggacacagtttcagattttacttcaaatggaggcaaaaccatgggagagccatgcagagacaccccttgatgaactctgcttcacgccaatcactctggcagctaagaaaagtgcattctctctccttttgcagttctcctggtgcctagcacagggccaagggcacagtagatgtgagcctaacacttgtggcctttgctgatgaaggacagtgaaggggataagaaaacataaagatattttgggctgcaagggaacgaactactgaaaaactactgcggccccctctatttatggagatgctgaggccttggagagggaattgacttgtccaaggtcaaccagaaaagtgatagcaaagccagggttagtatccaggtttctgctgattgcagctcctcagataaaagtaagtgacttgcctctcttctcccatatccagaattgatctcaaacactgtcatgaatccccaagggccagagagacacacagcatagaccaaggtgagtaaactgttttctctctttctgatgatctgagctttttcctggagagatctcaggtggccaagaaaccaagttgcccacctcatggttcagaggaaacaataacctcctggcagcttccctgggagcccatgcaggtgcctcagggattaaggagctcctgaaaacaactcctttcctttgcaggaagtgattttccacccctgaggcataacaccaggcagaggctctatcagtgcctgctgatataattagctctggacagactctccaaccaaggcagacacaaccaggcccttgctctagaaacaaaaagaatgttctggacctatcccagtacacttccaaaccccacgccttcctgggcaagtcggggctcagagaccaacaaacccaacagacttcagcagcagccagggagctggcagcctctgtcccctgaaatgccacttttttttttgtgattcagcctctgtttcaagctatttttagtgtaagcaaaggctgcatctgagggaaggtggtgtgggaaaggggtctttactttctctctccttttcaatgaactgtcctgtttcccttaggacagccatttcaccaaaagccacaaaacatgtggggagggaggattaaaaagaaaaatgggaaaaaggtcaaaattcagcctgtttgctaaaagtctgggaacagttctaggaaggtgatagtttctcgatcctttgcgttaacctgctgaatcctgggctgctcctgccagtggggaaccaatatgcccagtccatctaccttccgaattaaccaacctccagtaaacaaggaaggcccagaagtttgctctcccagggacgtggtgcaaacaggtttaatggtcccccttgatgccccagggaaggatgtgtgcccttggaggcttgtgaacagagaagcaagcttccgctcacagaggaccctggcttcccaccctcaccccgtctccatcatgtcagcacaaggccaattttacaaactgaaattaactggatgagcaaaaagatagccttggtgcttaagaggcttgggtacatttaattgagtttccaagtgccctgattccttaagaaagccagagaagccactgttatgtcctagatccctcactactcaaacaggagagaatagtttttacaataaaaattttagggcaaatggtggctttctgttgttgtcatttccctgaagtaggttttttgtttgtttgtttgtttgtttgtttgtttgtttttttctggaaaaagcctcactctggacccagagtctaaaaatgaggcttttagtgcaccaaattgggctgtttggggcccgtaggcacgagtcagtctgcctcctcctaaacatagcctcgtaaactaaacttggaagcatcagcttgcgtgtggtcccgagtgtgactttccaagcatgcactcccctgcaacgacaaaggctgatgactttgtcatcatcatctctatttttgagtctccctgctaaacaaactttctcgcagctgaaatggaggctctaaggatatttttctgacaaaaacggagtgctaagccatcagcaccctctgaaggccttgggggaaaacctgggtaagaaaagtctcccagcccaactcagtagccgcaaatacagacatttcatttcctgaaatgcctccagggggcgccagctttcatgggttgggaaggagggagggaaggacggaggaatggaatgaggcgaggaaggaagggagggagggaggaagggagggagggaggagggaggagtgggggaggtgggagggggcagtggggaggaaggaaggaagggagagagggaaagaaggaagggagagagggaagggaagggagggaaaggaagggagggaagggaaggaaggtaagggaggcaagggagggaagggagggaggcagggagggaaaccaactactcacatatttgcccaggcccctgggattcagctgcagaactgcacaggatgtgcaatcaggactagaatgtctgagctcccaggcctgtccaagggactgagagatgggtcacaggttctgacttatcactaaaccctacttcagaaaccttgccaccccaaatcattctagaaaatgcaagcataacatttccaccttcaacactttggatgactgcactttgcagcttttgctgaatgaaccaacatatgtccagcacattgaacagtatctgaccccgagcaggtgctccagaatgtttgaaggaatggatgaagggatggaggaatagctcagaggagctgcctcgcatgtgcagtagaatctgggtctttatcttctggtgacctcacacgctttcccatctcctttcaatgaatgtgtggtcactacctgtcaaaatgtacatcaaacccacctccccaaatactggtgcagatgtgccctccgaaaccagcctgtccctgccctgtcagcctcgccccacctccagggagaagtggatacggagaccacagtaagtgcacttgaccctttttccttaagactcatctgttgtcctgccaaggcatttcctgtgacacatgcgcccacaacgtacagctccagggagagcccagcccgttctccagtccccagccagctcagggaggctatatgaagtgagaatttcctggccaatttgacaatggtgagtcaggctggcatgagccagctgcaaagaggacgcagcctggacaagcctgaattaagtgtgtgcacagagcaaacatcatcatctggatggatccaaaccagggcttgcctggggcattcagagcctttcagatggccctgcccagagctgctcagcactcttggaagatgtctgggtttggggaggctcaagggctgttcttctacccctgccccagaaaaggatttgttcttcaccccctgacccgtctgtctccataccagcccatttcctccatgacatggtgaccgggctcacacacacaataacaaaaataataataaccatgcttatcaagcactaaccatgtcagaggcactgttctaaatattttacatgcattaactcattaagaggcagggactattattgtccccattttgtagatgaggaaactgaggtatgagacaatgaagccactcgcccagggtaaaagccaagcccctgagacagatggagctgggagtcaggagtctgcagaggctgggcttccaactgcccagccgcaccacacacagcagctccttcccaagatgggtgtcccagggagagaggcaatgcaagagctgaagtgagttttgaggctgctatgggctccacccatcctccttgtttgttccaatcaagtgagaacgagacacaaggagcaagatggagatcaaaaaagagtaggagctctagttcagatcatgatgcactgacaaaggggcagggtttctcactcccaggccccaacagagactgaagcaaagcggacagagacaagacaggaccggcagaagcaggccggactggctgctgactgcacagaggctgcaagtgctctgcttgcttaccaggcccccactgacctgtgctacgctcagttctgtatactagggaacaccaatcaatgtcggtggatcacacaggtggatgaatggacatagatggatgggcagacagacaatgggatggaaggccaaagcaggcacccacatgcacctggaaacttcagaggagagggaaaacagccatgccagcacttgccatcagagccctgagggcctgggagccagagatgagtggccaggatcaagtgggctgtccctggaccaggaggctcttcctcactctggagccaactgagggttgatttctgaaactctccttcattttcacagcagccctggggagggcagaggagccaacacaccagctagtaaaattaacagctgctctttacagggcgtgccggagagcccagcacatggctcgaggcctgcagaccagaagctgctgcgagctgaggtgcctggcctgcaggccctgatcaggggtcctcttgggggtaaggcttagactctgagctgccagcagggcctggggtgtgggggctgccgaagcagtgggcaggtggatggagaaactcaaggaatgatgctgctacaaaattctcagacatattctcctgaccttgcgaagtggaaatccatatgttcaccccagctgggaatctgctatggaacttggggacccacctggctctggcctctccatctctaatgcagtacttagttgagcttggggaagtgaatgtagacacgtccccatgagaaggggacagatgttatatcttatctattacctatgccataggtaacttatggagcaagtcctgtaggccacttgaagaggaatattgacaggcatacagggagtggcaattgtttctttacagggacagatggtaattattttaggctggtgggtgttttggactccggatactactcaactctgcctttgtagcttcttacagaagcagccacagacgatacgtaaatgagtgagcatggctgtattccaatgcaactttgtttatggacgctgaaatttgaatttcatatagctttcacatgtcacaaaatacacttattttgatttttaaaaaataaccatttaggccaggtatggtggctcacatctgtaatcccagcactttgggaggtcaaggtgagaggattgcctgggcccaggggttcaagaccaacctgggcaacacagtagaaccccatcagtacaaaaaatttaagaaaacatagcatgtcatggtggcctgcacctgtaatcccagctatcagggaggctgaggcagaaggatcgcttgaacccaggagtttgaggttgcagggagctatgattgcaccaatgcactccagcctgagcaatagagtgaaaccttgtctctgaaaaaaaaataaaaaaatgtaaaaaccatccttagcttatgaaccacacaaaagaggcaatgagccagactgtcccacaggctataactaactgatccctgggctaattaaatgtttcccaaagtgagtgctatgtgatgcccacaggtattacatggggaaaggattccacagggaaatgaaaatggaaaatgctgggcaaaacagagcctttccgctttctgactgcaggacttctgtaagtatttatatgctgatatgcattggcaatctcgaggagggggatgagaaatgaagtctatccaagttcccagggaaccatttttatccgggaacaattcgtgggtctagtgttctatggaacctaattaaagccatgaggataaagtctaaccaactgtcagcaacagcactatgaaatgcgatcctgctgctctttgaatatttctagtaacaggcagctcactacctgtcgggggagactgctcaattcaattatttctctgactcatgttttctcatctgggtaaatgatgttgagtcaaaaataacaaatctagtgcaaatctagtgtatctttcattagataaagacaaaatttcatgtttaatagtaaaaaaagaatgtatcttctttgactttttgactgatacccataatgtgatttcagtatctatgcatgggatgaaatacagaaccactattaagtcctggaaggaaattatcatatggttcctttaaacagaagcctcccttaggagtgttaaaacaatgccaataaaactccaactgattcccaatagcagagagcaggacatacctattcactatgggacattcttactaaaagtacagtcctgtgaaacctctagtctttctgctacacaaggcattggccaatgatgtaagaattttacatagatttgcctaaaatataataaaagctggggcatagatgaggggggtgagagacagagacagagacagagagagagagaagtgtgtgtgaatttgccaccaggcaccactgagaaagaaaagtagaggatactgatgggaaatgtcacaacctccatagggcacctaacagaagtgaatgcaatgaatgtgatatatttgattatgtgtgtgcccatgtgtactcccactgggttcaaccagtctaatttcatgcgcaaacagcacatcagtgaatgtacatctatttaactctgttaaaccaataggattattcctatttgaaaggcatatttgacacatattttcttttgggcccttggagataaagatgaaatggtccaggctatgtatataacgttaatgtaaaatgccacacatgcaacatatttagggggataaagagagaggctgatatttttctttcttcttacatcgataaatcatccctatacattcaagcaagtagcatatgctttcagttcatagaattagctgtgtaagcttcctggagcaatacacagatgtaacagcataggaatatggggaaagtaactacaaagagtgattctaagggctctctctagctttgctcaggagctggtagctattttggcaagaccagtctttgaagagacacacaaaacattgaatctgtcagggggttgaggtaaagtctaggcagtgtagatgtcgctcccaagttgaggtgaggctgtccttcaccacaggacatagtttccctagggagacagttgctgtgagatcaacatggaaatgaatatgaacatgcagaaactaagtgacaatgtggatagtgagagtatgtgtgtgtgcctgtatttatctttgtgtgtgtatcactgagtctgtaacgctcctttacaaagagtgtgacactcttgctactcgaccttagagaatctcttcgcctccagccccagactttcaatttctttatatataaaacaaggggataaattagactgagtcagcaaactatggtgtgtgaaacaaatctggcccaccacctgtttctttttttaaaacgttgtattgacatataatagtgtacatattttgggggatgcatgtgatattttggtacatgtataatgattagatcagggtaacagaaaaccatcacctcaaacatttatctttgtgttgggaacattctaattcttttctagctattttgagatgtacaataaattactgttaactataatctccctattgtactatcacatgctggaacttattccttccagtcaactgttttctctaccccctatttctataaatacagtttatttgtataaatgtaaggagtatgagtgcagttttgtcacatggatattttgcacagtggtgaagtctgggcttttagtgtaaccgtcatccaaatagcgtgcattgcaaccattaagtaatttctcatcactcatcgccacctcccacccttccaccattctgagtctccattgactactattccactctctgtccatgtgtacacactatttagctcccacttattcatgagaacatgtggtatttgacttcgtttctgagttgttccacttaagataatggtgtctagttccatccatgttgctgcaaaagacatgatttcattcttttttatggctgaatagtatcttattgtgtgtgtttgtatatatataaatgtaatatatatacatatataatgtgatatatatgcatgtgtgtgtatatatgtgtgtatgtgtgtgtgtgtgtgtgtattttttttttctttatttaatcatccactgatggacccttgggttgattccatagctttgctattgtgagtagtgttgtgataaacataggagttcaggtatctttcttatataatgatttcttttcctatgggtagccaccaattagtagaaatgctggatcaaatggaagttctgttttcacttctttgagaaatttctgtgctgtttttcatagaggttgtactaatttacatctccatataagtgatccttttctccacatcctcaccaacatctgttattttttgtctttttaataatagccattctggctgctgtgagatgatatctaattgtggttttaatttgcatgtctctgaagactagagatgttgagtattttttcatatgcttgttggccattcgtatgtcttcttttgaaaaatgactattcatatcttttgcccacttttaaatgttatttggtgatttttgttgttgagttttttaagttcctcatgaattctggacatcaggccattgttgaatgcattgtttgcaaatattttctcccattctataaagaaagtttactggaacaaagtcacaccaaggctgtttgtggctgctttcaaactactgtggcagagttgagtcgtggagcccacatggtctgcaagcctagaatatttactatctggccttttatggaaaaacttaccaaccctgaatttgactaccactgttgactttggcttatgattctatacagcacaaccaaactatactaaaacctacaccatacgtttcttgccctctttatttagaaaccaccttattcttagggggatttaatttacctgacaaaaatgtatggaacacataactgcatacatgtaaattccaaataggagtaagaaaagtagggcaaagggaaaatgagaggagagatgatgaagacaagccagagcaggggtgcaaagacacagagcgcaaacctgagccactctgtattttccataagccaccgacttggctctgagcagccaccactgagagacatgatccctttctcgatttagcatgctcactggatgttcaccaggaaaaccacaacaatctctggtgcaaaacactacttatcccatgagtctgtgcataaagcaggtaacatgagatgcagtgaacaaagtcctcaatgacacccaaacagttaagagaaatcctgacgacattgactgctatatccaaatttccctccgcatgagccgactccaaatcccacagtggaatttatcagcacgtcttccagcacatttcaatttttttaaaaaaagcaaacatatattacttttataatcagaaaataaacatttgtttagttaagaaaaaaataaaaggaagcagtactcttgacagcctggtgttcactttaatgtagaatccctcagccacgtgctccaagagaaggctctgtccagtcctgctgtttttggccagttgagcctgagtgccagggtgagagaggaggcaaagacaggctattctgagatctggagccggggggtcaaggaatttttatcatgtggataatcaggctccaggcgttgactataaaaagcactggtgaatggcaattatcatttgtcatttcttaaattgagctctgcatccttatatctagtttatcaatataaataattcacacctggatctctgttgctcactgctttatgcccagtgccttgaacagtgccaggtacagatgagcagtaaacacttagtgaataacggatgtgctcgtctgggagatcctacagatattctgaggttgtattggcaaattcttccccagctggaccttactcatgatgtcccagcttcgagattcacacctgtgacaattagacaggtgagatagaggcccagatgaggaggccaagctcctgagcgtgcatcaaggaaaacaaattaaaaattgaaacgggaaactgaatagccagctgtctggtcttgctttggtcccattgttgcagggataaacatttggacggctcaagacaaacacagctttgggttctgaacaggcagtgctgctttctcttgcccgccattacttaattgtgaaatctcttctttgttcagtgcagggacctgcctgctcctaaagggcaggcctattctcaggataccgcctggagctctgagatgcctgctttctgtgcagcaggtcccacttgctctgcatggccccaacagcctgggcaggattttctccaaggagaccttcagagagcagctggcaccttgggcaggctcaggcaaagaggcctgagtggaccatgcttctacatgcaaatgtttaacaagcaggccaagcatcctcaggaccaaattggctaaaagatggtaatgtcaaaatgtcacagccaaagtgacagctgtcagtggcttagaaaagaaaaggcattatcttcgactgggaagtaatgacacaaaaggagcaccagactgggagacagggagctggcaggtactagcctggctctgtcactcaaagctgaatgtttttagacaaataattgcccttgctatatcttgattttctcaactgtaaaacagagatgaattcactgataagattggcctgttttcttgtaatgaacccctacaacacaacagcaataaggagatacggaagaaatacgacattgtccttccccttcaaactgatcataacatataaggttagcacagtgcctggatcacaagaggcgttcaacagtgtgattgccaggagagtctcaaggtggccgctgggtgtgctgggcccaatgagttccatttccatgatatcacccacatgggctacctgcatcttctgcttggtgtcagtgcagaccgtgccccaccaggaccacatcaggaatctgctcccatgccatcactaaagcagtagcttactgccctaacttgtcctatagcctccaagctctagcctcacccattcagtctccacttgtcccccagctctctctgtacaacaccccctgcctcaaaatctccttgttctacaaacttcaaaaattcatttttttttttttgagacggagtcttgctctgtcacccaggctggaatgcagtggggcgatctcagcagagccgctcactgcaagttccgcctcctgggtccgtgccattatcctgcctcagcctctcgagtagctgggactacaggcacccgccaccacactggctaattttttgtatttttagtagagatggggtttcactgtgttagccaggatggtctcgatctccggacctcgtgatccacccacctgagcctcccaaagtgctgggattacaggtgtaagccaccacgcctggccccaaaattctttagcatggcctttaaagccccaccaggctgtctccaggacacttccccagactttggggtctgcaccccccatttcccagagcgccaggctccttctctgtttttcctgctcctcactttgaaggctttcttctcctttaactctcaagatcctaactcacacttaaaagctcactgcaaatgcattctgtcttattaagtattcttcacaaattccagcccacctagtggtcattttcttgtgtttaagcctggatatgtttttattttttatatcttcccgccataaagcagctcatcttgaaatgggagttttagttcaaagactttcctccctatgaaagcttttctgatcagccctactttcccctacagcccctccccacactccacaagtgcacaccgtgtttgtactcatagcacttatcctccatgcattccttcaataacttccgcatatggtgcaatagaatcaggatccttccttgttttctccagagctgaaacaaatacacttggcccagaattagtgttcagtaactcttgcaatgctgatgaagaaaattagaactgtctataatggccacatggaaggaacaagtgtcacatttgtgcagctaaactgtctgctgctccccattcactatcaccaccatacatatagaatacactacctccattttgtccccatgaatacccagactcagaattcaacctctcttaagtttccaatgcagaatccactcctcttcaagcatgaaagagcaatggagacttcagtcaagaggcaggaggagagatagaggtgctgttacacagctcagccaacagcaagtcacctccaagtccccactagacactgtccctcctgggtcacaccagactgaattgtctccctctctgccttcctccaagcagccactgacctcaccagtttctctctcctcctccaaaactccaactttaaatgtcccctctttccattttgccatcaattgacatcagccatggtttcataaccagacccttcagcacacagctcacggcagatccctcggtgaacagaacctgtctttcttgaaggctgtgtggccagcacctttgattactcaagcaccacgttcattctctcactccttcccacaaaagtgtgtgtgatattgatcccagacataacattgagttctccccaagaaggattctgagaagtgaaattctcaccacctccctccatctacagtcacctcttcactgagtttttgctgtgagactcagagataatgactgttttccagtgtccctgcctggtctttgagcctcgcaggcctcaggatgtccctactccttccatctatgagccaaatgactcttgactgagccctagcttcatgccaggacaggtggcccaaacaaaacagcttccagaatcacaatgagaaatcactccgaatgcaatatccttctcagggaaactcctgacccagagcagacccaagaaagcaagctagggctttcctagagcatgggcctggctatggcgaccaattcatccctgtttgcccaggactttcccagtttttgcactgaaagactcatgtctcatgtacccctcagtctcaggcaaactgggatggttgatcactataagcctgtcccagtaatgatccttgacaaaaaccaagggctcatgaggccagccagtgaagccaagcttcatataagcagatcagagagatgttggaaacatacagagaaggggcagaatcagccctggttgcaggtgggcttaggagacaatctcatcagaaaagggcacacaagcgagctctaggtacacgggccaggcagcctcaggtgggctactgatgcatccaccatcagcatgactgatttctaccgtgcacagggcccagctcacacactgcagaaaattaggaaactgctgcaagagggggtccctatgggctaccacaggacaagaagaacatcccccgaagaccaccaaacacacactcactcagcactccccaggatccccgcatttgtagcccttccatgagtttctggtatatttccttaaccctcttctcctctccaagatgatggagggtgtgtgtgtgtgcgcgcatgtgtgctttagcagaggaaatgtgctacatcttcccaacaacccttctccactgcaaatcccactccttgaaaatccctccacaaaccactgtacacaaggaaccgagcctctcctccatgaccacgcgggagcacttgctgctcacccccacctcccaatagccagcctcctgcagaagaccctggggaatatcacgtctcataagcaaagccaccttggcccagacagcaaggcctcctggtgtgagaagtgggtggagactcaccaggactctgccagtcagtgtctgggcggatatcatcacccccgcccagtccttcacggaggtcatccagccgacctcggcggccactgcctcctctttttcatccactggtttgagagtgccatccgcctggcttgagccattgttaatcttctgggcctcctggcaacagagagagcaagagttaagacatagggaacaatggatttaaataacatgctctacccataaagaaccagagccagaaggggtccccagctgagatggaaactagcttaaaggtataggagtaaagcagaaggggtaaattatgcctttgatttttttaaagcctttatttaaaaaagaatattttctttatttcctcttaaaatatcttagtgaaacaaagaaggatggtattattctattctattttattttattttattttttgagatgaagtctcactctgtcacccaggctggagtgcagtggcgcaatctcggctctctgcaacctccacccaccaggtgcaagcaattctcacgcctcagcctccctagtagctagaattacaggcgcgcggccaccatgctcggctaatttttgtatttttagtagagagggtttcaccatgttggccaggctggtctcaaactcctgacctcaagtgatccgcccacctcagcctcccaaagttctggtctcctcccattttaaagaaaaagaaaataccaaagcaagaggaaacgcaatctgtctaagattagggcatgctgaggagggaggaggaaagtgtgggagatgtcctgtggtctttgcctacccagcctctatgccccttttcacagcagcacccccactttcctttaggaaaattatctcttcctctcagtctatgtagttcaaaggggacagatggcctcacattggctccaacattggagtcctttctaccccctgccaacagcaattgggccattaataatcacatgatccatgccaagccaataagactcaagcgtggaacatttgcaggaaagaataggaaaagtcatccttccctgagaatgaagccactgcagagaaaagtaaaagtaatagactactgatgtcatcatttgaacacccggatccagctgtgcctgaaatctacaccagacctttccagttacaggagacaatacattccccttctggcttaaaatgtgcttgaggaaacaaggctgatttcatcagataactgagccccacacaggggccgaaactgtaaacctttgcatacagtgagtgttctgcctggaatactcttctcccacagagacttatggcctgctcccttaagtctttgctcaaatatctccttttcaatgaagtcttccctggccacctgtttaaatttgcaacactttctttccaatagcacttttctgctttatttttctccatagcacttaaaaccgctaatatacttaataattcatttacttctttcacttactgtctgccttccccactgctgcagccttggtgcctaatagagtgtctgggacagagttggctcaataaccatgaatgaatgactagaaagggctatgagtatcagcccctcgttagctacaaaggctgggtttagtgttgccagataaaatacaggatacccagtaaaatttaaatttcagataaacaacaaataactttttagtataagtatattccaaataccacatgggacatgcttatactaaaaccttattatttatctaacaatgtacatttaactggaccccaacacaaatacccactgcaactatgactgcagatgaagatgtttaaaaagatgccagcaaattatgttcatcatttaaaactctggaattaattcccaaggcaaagccacactggggatcattgtgatttggagtaaggggaagaaccaaagacagtggtgaaaagctttgtctgcagtgacaaagggggcggggcagagggaggccaggcacgtgggaggcaggtggggagggtgcactggtgagtcatcctcttggggacttggccacggcaggcaggaagctggtcccgattcctgcttctctccctctggctgcctgtggctcagggaagctggggaagagaaaagtgggacctgcagccctggacgctaatattttctttccaaatgtgttaagccccacagagctacaatgatccaagaggaggcccaggagggggaggccactgggcagatgtatctgggggctgcctgctgacatgtgtgggacctgctgcccaagcctcccaggccagcctcagataggacctgttaggtcttgccctggtccctgagcctctgccctgtgagactctgaacaggagggtatttaggaggatggggaggccctgatacagggtcaaccatggtaactgaaggtgtagattcgggggaaaatccagctctgccaccgctgtgggacctcaataagatggggacagtactgccagcccctcaggcattgtcaggattaaacagtgtccaatagcacaaaacacaggttcaagcaattatcccagcaccccttgcttcttctcgtgcccctgacaccataaagcaatggttatcacaatgagcgggcatcataagcacaccagagggcttgttgaaacacagtgtgctgggcccatcccagaacctacattcgaaccaagatgtcaggcacttctgatgctgctgggcttggaagcctactttggggaccacagctcctgactaccctagtatggctcggtgactgctgaaatgagacatggatcttcacccccagctctctcctggcctctcccttcacccaaggacagaaccacctgcttgtttcaatattggacattggtggaggggtgaggaaaagaggagggcagggagatcgtcccacatctgaggctctagtgtttccttttgagtcaagcctcccaggatgtttctgaactggtccctggccaccacgtggggacctggaagatagctccctgctcctcagtcctgggggcccaagttccacagccccttggtagaccctggagaggagaaatcaacgtgaaaaaggctgggaggcaggggggccctccagtcacagtggttaactgcatcagtaattcatagcacaagaggtatgtggcagataatgctatttcgccagccctcttacctattgttttacaaggcattcattattttaattactttatgataggcaaggaaaaacacagactaaagggagataatgcccttgttattatttgcttacactagatgttgtgagcttaattaccatgtgtgggaagcaggactgggaggagtgatgggggagctatttaaagcctgatgccagccggccagactagccaccaggctagccacagatcttgtgcctggaggaagaggcccctctctccaccactgacttcactctggccaaagcacctcttatggggagcaggcattataactccatgctccaaagaaaaagcagagaaggttcagtagccttgctgggaacatgcaggggcagagtccattataagagtgttggccaccattgaacaagccagaactaggtgccagcaactaagaattaagtgttttctatgcattgtcttgcttaaaccttataatacatccaacaggcaagtgaaattatttccattttacagacagggtaactaagagcaggtatctctcagaaaaaggcacagagcctgagagctcaggctggaagcagagagcccacctgggcttgtacctgctccagaacttccaagctgatggctgtggcccatcaacccttgagtctcagcctcttccatgtaagatggggacaaacatgccgcctcattaaggtggtggggaagctgaagcttggcacagtcccgggcacacagtggttacagctgccctgatgaagcacccgctgatggggctggggcctctaagagtaatccactgaagctgcaccactttcatcaaccagtggccctgggaggcacactggccagagtgaacctttaataaataatcacagaatggaggataaggaggtgcaggttctaacactgttatcctccaatgagcaagaagtccctataaggcaaggtgctgtgactcctgcagggcttctagtaggcgctgtgtgaccaccacccaggacagctggggcagggattcccgcacagggtggaccccagacccagtgacatctcagaccccttctgactcgccccattagatcaacctcccatttttaagatgagaacgctgaggaccagggagaggctgcctcctgagtcccagcattccgttcttgctcctggccccacaggatactgcctcacaggggaacaaatggtttgttccaaatagcaaaggggatatgcagccacgcccaaaccttccacctcccactgcagaggaccctgtccttacacaggaagcacttcccagtaggggcagcccgatgtcagtcaggaaatcactgagtgcgtgtgctcacacatgtgtgtgtgcatgtgtgagagtgtgtgcatgtgtgtgcacgtgtgagagtgtgtgcatgtgtgtgtgcgtttgtgtgcacgtgtgagtgtgtacgtgtgtgtgcatgtctgagaatgtgtgcatgtgtgtgtgcatctgtgtgtgtgctcacacatgcgtgtgtgtgtctgtgtgtgtaagggagagaaaccccactggctgcagcctccagctaccccagcttcaggaggacaggccaccagatcttctgaaatgcaagaaaagatgtcttgggaaaagaaaggaacatggagggaagaatagggagaaaaatgagaggtgaggccatcgcgtggggaggccatctcagaaagaggaggtcctgcaggagccctccccctgcccttggcagctccctgagaaagggattcggccttgcactggaggccactctggatctgcctccaaccctgccctctctccccactagagccttgtgtaaagcaggccacagctgcctctcagtggcaacagtgacatctaatttcagtgcccacatcagaaggtggggaggaattcagggcaagggtgcaggcacaggaggcagggaacaccagagagaagagtggccacagtcccctcccgacacccaccctaccaggcaacctctcacggggctgtgcccagccttacaccctcacccctttctatgccttctccccattccctttagtggtgttccccacgatgactttttgttgacatggccgcagaggggctcacccttcctatgtcacctggggccaagggcctgactgcaccccatcacctggtgctcaagatacaaacctcatctgatgcgtttgggcatttcccgctgaatcacaagatcaaagaccaaagcttgagaagggaccttagcaattcctgaggatccccaccaccacccaactaccacacacacagtgtacagatgagaaaactgaggcccagagggaaagccacaagctcagggccacccagcccagccaggtgaccaccgggccaggaagcaagccccagttgctctgtttcccttatctcttgttgcctccccgataagacaattgctccaaatctagcccaagtgacagtcactctgctgccccagcctggaacctggagttcagggtgttcctaggactggcagaaggctccacctagcctggtactgggttcaggtgtgagggtcacgacaagggctaatcctgcttgtcttcaaagggcccagccttccccagccacgacagctgctctggtctagcacaggagagcaagcttgtgctaatcctaggaccccacagccccatccctcagatttggctgtctccgtctctcatccttgctgaattagacccagtatactgggactctcaggtctgtggtgtggcaggaagaactatgaaaatcaaaagatactctggaccaagtccaacttttctgggtggcctccagcaagtcatgtcattcctcaaaccctccatattctcttctatgaacagggatgagtcctgccttgtcaccctgcctgattcttgcaggagccctaatctggtaacagagcattgcctttctgaaagcaactgctttacaaacggcaggcaagtggagtcactgtcctctggttctgggcaggaagcagggctgctctggagaaagaagtcctgtgccacaaagccagagccctcacagaacgcagggctcaacactcagattcctacccagctgcaacttgcagggcaggtcccccgttgtcaccctgcaccctaacaggatgtcaaattgccaagtctcagcaggtgacctgtcatgctgggcacaccctccctgacagggtgagctgctgccacacctgctctcacccggttggactctctcacccccaggcacactcctgacacctgtcaagctgaaccaggcaccaaggtcactgcaggcaccacacctgctggatgactgcctcaggcatgagaagctggctgggcccgccttgaggggatcccagggcccctccctgctgcctgcctagagccaagccttgaagctccaagtctgcctcgggtttaactacgtgtcagttctttggacactggttcctcatccaggatctgggaagttgtttaggcaaaggccatctgggaagaaaaatacttttcaaaaatgtaactgaaatcatgtcactgttgtacccaacaccctcctatggcttcttggcccattcagaggacaagtgaagtcttcacacccaatcagccccactcgtgcctgtcatcctgcgagtctgccgctcactagctccacttcagatgcaatggcctcctcatgctgccaggacattccagacccagtcccgtctcggggctgtctgcactggcctctgcctctgctccagagatccccgtggctgcaccctcatttctctcgagctttggttcacatcctcactttgtccatgagctctccacctcatcccgacctctccctgtctgtgctgtcttctccggagtgtgtctgccacctgcttcctttacttcatcattgtgtgctgtctgcaagctgcatgagggaaagagtttttgtctgtttctttttgttttgtttgttttgttttagacagagtctttctctgtcacccaggctggagtgcagtggcgtgatctcggctcactgcaacctctgcctcctgggttcaagcgattctcctgtctcagcctcctgagtgctaggagtataggcatgtgccaccacacctgtttagtttttgcatttttagtagagatgggggtttcaccatgtctgtttcatttatggctgtatcttcaatattgaatccctgtgagctcagagtaagcacctgacaaatcttggtgggtgggagggaaggaaggagtgggggaaggaggagaggagggaggagagctacagcaaatggaaagtcagttcttaccatgcacaatctagaatagatattactagtaaatagtactactaacaataattatactatcgactactgttttttagcatgatcatagtaactctatgacgttggtactaatgtcctccattgacagatgagaggttaagtagctggcccaggaagacacagtgtgaatttaaatccagctgtctgatgccaaaaagggacacgtacccatcctgctgtcctcccgggaacagtgtgagcagcagacgggagaatgcatgtgcaaggattattggctgctgcaaagtgcccacgaaaggtttattaacatgaagagcactcaattcatgccacttctgggtactgcttgtaccatcacgacccttcttccagggccctgtgcctatggagggcagttccatcaaggacagagaaacacagttcctttctctgccaagaacctgcccggaaccataaattcacccttcgtggagcagagtatcacattggaaatgagcgtggccaagctgacgggctgtgaagccctcctgctaagaaccacggttctctatgcagatgctgctaaaggaagatttggcttcctccctcgccatgcgtatccttggagtccttagcacgctctgcccagcggtctccagcactaagaggctgagctctgccgggcctgacgcacctgagtgggaggtagggttctgacagggaacaggagagatcaggttagcacaaaaccatctccgctagcccttttgggaccagagtaggggctgggaagcccctctcatccctggaagctggatgttctgcccagcaccctggaaccatgggatagtcccaggatgcttgacccccagagggctgtgagagaaggaagggcctcatgcctcacagcccctttgtcctcaaattttcctggtcaacatcagaaggccatttcccctgagccttcattgatggactgcgctctgagttactcattccatctgccaggagccccaccccaccctctccctggccactccattgccccatctcctctcgtctgttgaaactgacccagcagccccacatgctgctgtcctcaactgggcacaatgcagaagggctccttctctcctaccaaagggtgggggcagggggaagccttctggaccagaagctatgaagccaggcacaggctgtgtgccctgggccagtcacctaacctctctgagaagagtccctatctgggagacgagagggggtggtgagttaaatccacagttttctgtaccttgaggcccagcattgtgaggtgccccaggggggctggttaccaagggagggcagaggaggcagggccccggaccccgcggaaataaaagcgcctctgcattgagcaatttcacctattatggttctgtgctagactgcatctgagtgaagggattttctggggaaaaacattagaaatcccctgagtaaaagtccataggcccatgttagcttttttttgttttgttttgttttgttttgttttttgagaaagagtctcactctgttgcccaggctggagtacagtggcgtgatctcagctcactgcaatttctgcctcccaggttcaagtgattcttgtgcctcagcctccctagtagctgggattacaggcgtgtgtcatcatacccggctaatttttgtatttttagtacagacagggtttcaccatgttggccaggctggtctcaaacttctgacctcaagtgatccacctgcctcagcctcccaaagtgctaggatttacaggagtgagccacctcgcccggccccatgttagctttttaaaaaatgctttgtttcatgacaataactatgacatcctgtggcacagtttggcctaagatccagaagtgtctgaacctcaataccttaggaagccctggggctgctggtccctccccgcgggctgctctcctctccttcgcctcaggttttcaccagccccgaatgctggggctgggtcttccgtgtcccccctcccatgccaaagaggacatccacccagcaacctctttcacctcctgggcgggtttcccagccacgggcattctcccaggtaccaataatcctgcatattagggtattaggcagattacccaaagcagctcaagcaaatcaagcatagcatgggcaccaccagctggggttttcatggcaagagttctgcaaagggaatggatggaggaggtggttactctgagactcaaggaccagagaaatagggcaacaggggacccaggtctttcctagagctggtgtcaggagtggcagagttcacttctgcccctgggaagttgcatagtccaacctctccctggctgccatcacttctcctgctctgcaccccggagactctgcaccagcagggcttaagacatttgcactgattaattcacctagcagttactgtgtttgctaactgtgggctgtacctttagggaagggacacactgtccacagattcaggcaacaggaacttataaagaagctgggacctaaccgattaccccgagctgtcagaaagccctgtgagtttactgggtgtctcggctggacctacagtgctccaccattgaggcatttttagccattgctttctgggtgccctgtccagattctcactcttagaagcacccctgcgctgggtgtgaacaactactctttggaagtcttcatggtagaaaaaggccaggtgacctttaacaagtccttaccatcttgtgcctcaggtttctttgtctcaaatgcagggagccatgtaaacactccccaaggtctgtccagctctaaactgtctgacccggaggcctggattgttaagtcccttactttgcacgcactgtctcagctctgtaaccctgggcaagtcaatcaagcatcatttccctcccccgggaaatgctgcaggacagattccttttcagctcttctcagagccaggttcaaagctgctctcccattccctgaggaccaagggggtcaactggtgctcaggagatcactgatcccctcttacatctactgtgttctgtccttggtgattttacaccaacttaatcttcacaagaagcctgcaagataggaatgttttttctttttttcttttttctttttcttttgagacagagtctcactctgtcgcccaggatggagtgcagtgatgcaatctcagctcactgcagcctccgcctcccaggttcaaacgattctcctcctcagcctcccaggtagctgggattacaggcacccaccaccatgctccagtaattttttttttcctagtaagatggggtttcaacatgttggataggctggtctggaactcctgacctcaagtgatctgcccgcctcagcctcccaaagtgctgggattacaggcgtgagccaccacgcctggctgcaaggtaggaatgtcatgaggctcagagagattgggtaattttccaagattacccatcttgtaagtggcagagctgaaatttcaatctagtccattctaactctgaaggccatattttttctctctattccacactgtcttgggataggtccaatgtgcaagaacagagatggaatctccatataaaattctgtttactactactactgaaacaaccatctcacaacctatggcttctaagtaacaaaatcctgtagtacagacatctaaattcagttataatccactatgtacggacagagagttggagaaatgggctaggggacggggatccaacctgggaatacaatgctcattagacattagatatgttctcaaatggccacatatgctgcctaaaattagtaaggcaacctccaaactttcagggctaatacatacatcctggccaatgtgccgtatttgtaaaataacaatctccttctctttcaattagcttaataaaattggaaaatataagtgacagtccagagtccactatcagagccatagagactttgaattggattagtagagtcctcagccaggatgaccctggcagggtccaagacagcctgctgtccatcagagactcggagactcagctgccagtctgcagggcagcccatcctgccccagaagctcagctcaagacctgcccagacaagaaaactgtggcaggggcccagcaggaaggcaaaaattacatttgtttctcatcagggcagactgggatatggataaccaaacacacaggaaatcccaaaccctcatgttcataaaagaatgcagaaatcttcgtgccaagttaacttttaccggagggagcccattgccatcctgtagaccaggaggaggatccagcccccaaggagcctcactctcctcagcaaaggctcctgcaggtagctcacaggtgctctgttcccatgggtcctgcatggccacagggcagtgctgcccctgatgtggtacggaatgaaaagcctcagtacagcgcactgtgtgtgtcagtggaagacaactgatgaagggcctctcccaggaagaactgtccttttctttgacattatatcgttactcctttgttgggtattaacatgtccttttaatgaaatgacaatggtggcagagctggcatttgacagtttctttttttatgtttttgcttgtcaaaataaaaagctggtggccttgtgatattctgttttataaaaattcattgattatcccacaaaaagtctaggaaccactcccctagcccaaatgcctcattctacaggcaggaaatttaaggccccaatattccacactcatagtggccaggttcccctcgaaaaatgtggctttcagacttcaggggcccagggtgtgtctgtcacactagccagaggcagccttggggccaggaaaggtagggtctgagggatggaggcatggtctctcagggctggaggagctctgcaagctgctggcccacacaataggggaaaggggaaggcaagcattttcagagctcagggccataccaaccgcctgagttcctggcatctaatgccttcactaccactactgcaggaaatgcacagaactataacaacctcccgggaaatactacaagtgttaccgtggccccaagccaccacccaaggggcaactgggaagaaagaattcaaccacagatagcagataggatgaattgtttatggttgaatattcccttcagagtcaacagaggactccaagcaatttggagtaaaaagatgagtaacccgagagcaatgtaagtcacagcccagtgccccacacggaagggaacacggtcatccccttcgctgctgttctttgcttcccaccactaccaccttcatcacacacgtgtgcttattctctagcagtcagggcagagtctgcctgatttgcccactccacatcctcaaagcctgaacagcacctagcacacggtgagcatttcacagtgcactgaaataataaatgaagaaattctgttttttgttctgtcctgctttgttttcactcttcgctcatatcttctggaatctcaaaaatcctgccaagtccacaatgccctaagcatagaagtcaaactcctcaaggcctgatcttcaaggcctggagctgaggctgccggctgccctccccactcgtcactgacctgctcttccacctgacttctcggctatgacttggtcctcctgactgccacacctccgtgctggctgttcccactcctgggatgctctccccattgctccccaaccatcttcatcctccctgatcaaatcccagaggtgcagtgaagttctccttcctggctagatctccccaaagctctccctgtcctgtctccagggcccacatctgctcccccaattccacatgggacaggtacttagctgtcttttggtccatgcatgttgcattgccccagttagcctggacaatccttgaaggcaaggcctatataccttttatgcccaaagtgtttggcatacagcaatgtgcttaacagacacgtaccgattgagtaaattaaatctctgctcagtgggcactggaaaagcaagagctttcccaggcatcactgacgtctgggtaaaccaggccagtttccatgacttgaagcttaaactgggggttggctcctaactgctgttcctcagggcagctacattttcaaataaaaacactaaatcccaaatgagatcagatgacatggagcttctgagaggcacatgccctaccaggcatgtcagtcaaaagaaagatgaatgttcttgtttacaaaaggatttgtcccgtgccaggaaaatttccaccatgatttaggacctaatccagtctgtgcctatagacctcaccaactgaacatgttcccgcttcttccatttgctgaacttggatggggcttggcttcgggtcaaaagagctgtcccaattaggtcgtcagacagcctttccccacacttaagatgatccccattcaggaaaccaagggctagcaagacagacagactttgggaggcagaaagatggccaggttaccaggcatacagcggcagtcaggatctaccgctccgagcacagcccagcctgaggaaccaggctcccagagctgccctgctccctggactctgcctctgacctcaccccttggaagaactggctgggttccaaaacttcagcctctatgtccctgggttcccacacaccctagtttggatctaggtctccaacacagcagccaaacacaagagagtccagagcagttgctaatgtgaaataaaaacaattcaacagcccagggaaaggagacaggacttctttttccattggattcagagaactccttctccttttccttctcgatccctaatgggagttaaggatggcaagcgcctggccctgcaaagcctcaactctctacttggctccgctagacccatcaatcttctctccatggcctgggacccctccaaccctggacgtcgagagagactcggcagctgtgagaaccttctttctcaagtaaggtttttttccaaaattatatcaggtttccttctaccccagcttgtcagtgggggactcttttgcctaacatggttgaggaatgtcttagaaactggtgtgattcaatctggcttctgatgaggttttccacccagacagagctcaccgagtgtctggaagtgtcggttccctacacccaggggcatccacaccctgtccccatctccagacctcagtgaggaggatacccttgacaaagtggctggtccagccctacgatgaagttggatccagaaaaagagccaagaggaagccaaaaggacttgcccacacacttgcatccacgggggcctccctcctaccatgtcccctctttcccccaactttctaaattggtgaatctacttgcaacacacccagtataaataattgaagagctcccgatggaagtggctcaataattgaaatctcaaaaggcacacacctttcttttagaagagagggccacctcattcagacttctccaggggaagtcgttcttcccctcattccttttcagactggcctccttctacaaatacagattttaaccagagggtaattgttagaaagtgcagtttgcaaaaatgtcagtaacctgaatgccaagtttactaatgaattgtgactaggctgttgttagtgccgccacactctcacctgaagacccacaatctcccctggacagagggaaactggctgtccctctgttactgctcagctactgcactgaggtggggtggcaccagggggactggcatgaaggtcacatgaggggagagttccttttacatctcagaagtctcttattataaggatctgccaactgcaaggagagaagagccctgcagagcagagggacctgccagagcgctgcaggcatcaactttgctggcgtcttggaaagacgccccacgtctccataacaactaaccatccagcccttagcactgacagggatggagaccttttttggaggagcagatccggaagaaaggtcaggtggttacctgaatcccaagtctctttgttttgttttgttttgtttttctccttttgcagctgtttttcttactagaagctaggcagaaagagttgttactcagatttcttgaacttgagacgtcaaaggtgagacgccagccaaggagaagggatggtcagggaagcttctggggataccgacagtattttattttttgaactcagtggtagtgacacaaattttctataataatttgctattttgtaatttttcattttatagacttttctgtctatactatttttttaaagtctttaaaaaataaattgggcaaactgctcttcagggacccatcgtcattgccagcatttattaagtatcttctggcacaggacagaaatcagtctgcaaatcaccctgtgtcacagccctggaaagcaggactgagaaccagaaaacttcagtggaagtcattggtcccagtggccaaagcaccaaactgaagaagaaagtgaagaggtcaggggcaatcacaacaagtcataggatcaatgggctagaggccccagagaacttgttgatgcagtttgctgttatcccagctttagagctctgcctataaacaaagtcatagagaggggaatgtgattcatgatttgtacctgccttggaagggcctgaagtgaattggggtacgcagggccctggccatcagtgaaagagtgggtcttctgctgccctgctgatccactgctgagggtaactcatggtcccagcacagccttcactgaactgtcaggcacatgaagcaatcaggagtctagattgagtttccaaaacaggagcacctctttgctctctgtaagcctccactgatggctcatgccagccacatggctcccctagcctcccctgcacccaccggaggctgttaatagacctgtcattgtgctcatgttggattaatgaccactgttctccttcccaaatcctacacattgtttaagagaaagcctaaacgctgcctctgccatgaagcctctccagacctcttcagtagagctaacgtctccagggctgtttgctcaatacttcctttcaggtatcagtcccctcagatatcacttgtttctctgcttatcagtcctcattacattctagtccagtggctacatccatcagtctcccggctaagaacctgaggtcaggagccagggcttattaattcttatatttcatagcatctagcactgggcctggtggatttgtagcaggtgtgcaacaaacaatcaatatttattaatatatcagggtccaagagcacagacccagtaaccaggaaggaaggttctttaggttgtcagagaacacaaagggcctggcaggagggaggccaagcatcacagagaaccttcacctttcaaatctacccacttctctccatctcagcttctctcccctggttgactcctaagcttcataatcatttacattgtatcatgcaatggtacaattcccacttagttctgcccctcattctccacactgaagccagagagataccacaaggtttctatcagtcacatcatgcctgtgcttaaactcttctcagggactcccccttgctcttaggcaaaagttaaggccctcagcatggccgtcgaagatgctctggcacatctggcctttgccaggcatctggccacatactgaaatactcttggcctcacctcccttaatccacagcaatactggacattcttgcattccttcaatgagcactcctcttttctaattcagggatctgcatgtcctaggtttccttttcctgtaacaaccttcttcacacagtcatattccagatgtcctactcatatttaagatctctccccaggaagcctttcctaactcaccctccacctccactccaccaccaccattgctatcagtcaataaaaccttccaatcatgtggtctttgcactgctccttcataacactcaaggcatttgcaagtacttgttcagggcctctttgcttcactagactagaggtgggcaaattgtttctgtaaagggccagataggaaatattttaggctttagcatatggtctctgttgcaactattcagctctgttgctggggggcaaaagtggccttagacaatatataaacaaaggagtgtggttgtattccagcggaattttatttagagacattgaaatcagaatttcataccatttcatgtttcatgaaatattcttcatttaaaatttttgttcaactatttaaaaatgtgaaaaccattcttagctaatgggccatacaaaaacagatggcaggccagacttggcccacagcctgtggtgtgccagctcctgcactagactatcagtttcctagagacggaagccacgtcttgttcacagatgtatctctccagcacagtgtcttgttctcacaaggcggttcataaaaattcactgaatgccttgatatgtggactagagccatgtttcccagtgtaaattcacggaacaccagtctgatgggaaactccatacaaaagggacacttctctttgcagtgaaatctggaaatgccatcattcctcttctaacaaatgttcaatgctcactgcatacagcatagcaaaagctcagagatagccttcagtcaaggaacctgttcaacatagaccaatacaatgctgcccacactcattttgaccaaataactttcttctttaacccaaaatatctgccagtgtccaagggcagccccactgaaaagtgatgcagtgaggagagacggcagaatttagaggaatgggtctcaaactttagtgtgcatcagagtcaccaggaaggcttattaaaataagaaactaccccagcccagagtttccaattcagtaggcttaggttggagcataagaatttacatgccttacatgtttctcagctgacgctaatgctgatggctaggggaaccccgttttgagaaacactgatctgcagaataaatgatttcaaggcttcggtcctctagctggagtttgctcctccatccaaggatcttattcccaggtgaactccaacttgtccactttctcacactggcagtagcagctctgacccatctttctagtcttaggcacctgtaatgggttgcagtgtttttttccaaaagatttgtttcaatagtaatccccagttcctgtgaaggtaagccttatttggaaagaaggtctttgcagatgtaatcaagttaaaatgaggtcatactggagtagggtgagctcctaatccaatatgactggtgtccctaggagaggaggaaagagacacacatagggagaacgccccatgaccaaagaagcagagactggagtggtggctgcaagtcaaagactgccagccaccagcagaaacacggaagatgcaaggaaggagaaaccctacaggcttcagagggaggctggccctgctgacatcttgatttaagccttccagccttctgaactgtgagacaataaattaacattgttttaagtcaaccccgttgttatggcatcactaagaaacattctagtccaaggacagataaagctctggccaaggccttattcttggtaggtgtccacatgaactctgaaggaggaagccacgatgtcagctgtctgttccctttgtcatcactgctagacagtgggtgtctgcgctggggtctgtttttggaaattagattatctaattaatgtgatgttttgttggatccatgccttagggctggatttggcaaaaagcatgtgattattttttactcttaaaaaaatgtcactaaataagataaggagacttggctttgccctatcttgggctccacatgtcctgtttctcactgagagaccctggcaaggagtttctcagtgacaaagaaatggtttcttctcctctagttctgagctataaacaccttctctaatcgacatagaaacggctaagcagtagatattttcagtcagagtaccccagttttagtcataaattatatgcctctccttttggaaatataaggggtataatttttattcttgggcagacatagtcctgtgcccgataccttaggaaagagccaaaaagagaatgtggacacagcttgtcatggtggatggagaggaaggagacaccaggggtagggactctgtattctgaagctctgaggccacaggatgaaaaatcagagccaagtgaatgccttctctgcctctccaatccatgccaacccagggctggctgctcacatggggtctgcacaaacttgaaaatctccagatgttttataggggggacaaagccacgctttctgctgcaacagactgtgagacttttaggatgctcaccccaaggcccttgaaaaatgagagaggggtctgattctttgagatgggtaaggcagaggcaccccgtggaagtcaagcattccttctctcttccctcccaaggccagcatgtaatttcaaatgtccagtccatccatgaacaatatgttagcctttggccaggcggtgagcttccaaaatgcaaacatctcagcctctgtctgcagaggtgagaattcagcttggcagaggaatgggacactgtcaaggaagacaagcttttggagtcagacaatcccaggtttgcatattggccttgttttgttggtttgttttgctttgtgttaaaatctaatttattctgcaaactacagcaggttagttaatcctttgaaacctcaggtttctgagctataatacaggaataattataagtgctttgcagcagatttgtgaggattctgagagttgttggatgtgtctagcacattccttctaacttataaagcattatatgccaagtatgaatctaagtaatgcacatgccctaatcttttccatccttacaactatttatagcactgcccccatatggcaaatgaaggctcagagaggtcaaggcacctgcccacagtcacaaagtcagtaagcagctgattctggagctggtgctctcaccacagggactgctatatacccatagtggaagcctggggctaggaatgaagatctgtgttcattcattcattcattcattcattcaacaattcacctgggcatctctgagagaggattactcacaacaggttctcagacaaaaaaaaaaatacaatctctccttccaggagttgaagatctctcaggggaaacagacaagtacccaaaactaaatcaaggtagaatatgacaccagggaggaagagagtatggcagaggacctgttaaatggcaggaacagactgatttaatgaaggtggtggtatttctgctgagcctcaaaggataggcatgattttgacagatgcactcagcctggttcagtccaaattagggcccccttgttctttctcatcacaacccattcatttcctttgttggactcactgtgattttaatttcacagctatttgctgatttatttgttcaatgctggtctcccacactagaccatgagcaggaaggagaggcagcatgcaactgtgctcgttgtctacacagggcctagcactgggcctgggccagggcaggcacctgggaggtatgtgctgaataaatgaatggatggatgggtggatggatgggtggatggatgagtggatggatggatggatggatgagtggatggatggatggatggatggatggatggatggatggatggatgaggatataagtattggcaggctggtggcagcttgcagaaggagagcacattatctataaacacattgccccgatttatttaacattgtagtcactccaaatcttggttaccctcacctgaattttctcttttgggggaagttttacacaaccaccccagtttccctaaatgccccctccctggattcctgcagcacttgaatttaggcttctgagcactggtatctccccaaatagatgagactccccatgtgggcagcagccctgccttctccttcatgtttgtccacagtgcttgggtgagatctggacatgtagcccacactctgttgaaacctgcccatggcatgcagctgaggggccctgccttctccttgtcctcatttattgccatcagtcaaccaccaatcatcccacatcgaccccagaggcattggtcttggggtctccctggtgcggcaatgtgggctgccttcccagccttgtccaggtggcaggacttctgctgctgacaacagggctgtgatactcagctccccaaggctgaactggatgactaagagtcctaatgattctggtattttttcaggacctgtctccaaaggcaggaggacatttaaaaatgcatgggtctctgctaggtgacacatcctgcttaggagtctgctggcctccagtctgggacaacagagcacttcaaataggcacctgtgttcatcgcggtgctttctgtccacacagggccttggtttctgaggctgagagaggataagctaagcaaggggcagaacaggacaccaaccatctccagaccccagtacaacacagatggcaggccaaagagggactgtgtcgtctgattcaagagtacagactacacagccagaataatcggggcctggcttggactctctttaaatattcattcctcatctgtaaaatgagcatatgagtcccacttcaccagactgtaggacatacgtgaaggactctgcagtgtctggaacatatttatggcccctgaaataaacagttattgatgacagagatgaaaagaagaagatccaatggagtaatcttcaaggcctgcttcaagtcttgccttggtaaagctttctattgggcactcatataaagcttatatgacttttttttgtatataacagacatgtatatatgatgactgtctactgggtatggttctgagcactccctaaatagtaactcattgaatcctcacaacaagtttatgtagtatgtactattattatgcccattttacggatgaggaaaataggcatgaggggttaggtgaacgactcgaggtcacacagttataagaggttgagctgggatataaatccagacagtctgcgctagagttcgtgttagttaaagatggatacagtgtgctgctgttattattcttgtagatgttgactattatagtctcttgtcttgcggagcagagctagtctctctcccactttcttgacaaatggtaggggcctcccctataacatctctgaagcccctgcagcacttcatagagccagtcagagtgagtttgctgacccacttgccaggacttgctgtgccctctgccttcttcaaggcatccccagcagagccttaaagggcaaagcctgcacacctccctctgcagcactgctgcatgccccacctccttccagggccacgctttccaacttgtgacctggacccaaagtaagaaatacattttacatcgtgacccacacatacctactatacaagtaattgcaacacaggattcatgaaacaatacctacactattacatggaatgtactttgatatcctgtattttttaacattgattacaactcactaaattgatttcataatccacttagaaaattcctcttaggggagttcagctccaacatctagcacatgcaatttctgagtgcagtgcacagcaattcttcccaaaggcagcccttcctggtgcacatcagcatcatggtgctgtcccagcccagatggtcacttatatattccccagagccctgagcctggctggagcacccaggcagtggaaagtcaatacaggctgggaatcaaggacccattcaaaacaatgctcacagcagacacagagtgaagaggcttgctttagagtatgatagaactgagctcaaatctcacctctgctagttactaactcagatgttattggacgggttcttaacctctgtgagcttcagtgccctcccctggaagggggcactatcaatatgcaccacagagggtgttagctgagatgtggagatgacttggcacagcacccagatacagatactgaatcagtgccagtcagtggtggtgggaggtctttgctaacacctcacaagggccttccctcccctctctttttgtctctatatttagagattctacaaccttcagaagaaatagcagtacttcctagcacataggtaacactcaacaaatgtctgaaccaattaagcaagggcccaggcttttgcccaataagtcatccaatcctgagcatccatccattcatttatttatttatttatttatttatttatttatttatttatttattgagatggagtctcgctctgtcacccaggctggagtgcagtggcatgatctcggctcactgctgcaacctccacctcccacgttcaagcaattctcctgcctcagcttcccgagtagctgggactacaggtgcatgccaccacgcctggctaatttttgtatttttagtagagacagggtttcaccatgttggccaggatggtcttgatctcctgaccttgtaatccacctgcctcggcctcccaaagtgctgggattacaggtgtgagccaccatgcccagctctaagcatccttttgaaggaagatgtgttttataatcccttctaaattcagtggccaataaagtctgctccgtgaattacactcattcaatcacagctgatatctctagatcaaggacaatgcccctctctacaggtgggaagacaaaaccaggaggtcccaatgtggcttctccaaggttcccccaaagttactgtcagtgcagagctggggtgacagagcccctgctcatcactgcctatgttgccttccaagagagaagcaagttgctcaataaatagctcatcaccctaaaaataacgaggtctctgatgagacttagtctctaatgaaactaagcacaggactgagggggtgaagagcaagcagaaaatggatttccaccatgggctagactgttcacgtggcccagtggtggagagaatccttagggaaagcctaactccgaagcccagagaaggaaggaaaactaataaggagtgtgttttgcaggctgatttttctgaagttatccataggaaaattcatttatgtgagaggctaattagtcatgacagtgctttgctccagacataattgcattggtcccatgcagtctctgtgggtcagcctgtaatggaatttccattacctattgtgttttggttactggagaaaaatgtgtgattggggaagaaagagggatgaagagaaaacatgaaaggctggaataccttgaatatccataaaaaccatctgtgattttaaaacttcataaagatgatggatctctaagagccagatagtcttcttggaatctgagctctgtctgcgggaactgctcctggcaggcagtgggttttgaaatccaagtttgtcagaccacagagcaaagcgagctgccccagcttggccactaggggtggaaacaagacccaggaaagggagactaaatgttcttctcaactagccaccagctctcaggctgccaggaatgctgggctgtggtaaatgaatatatagatatatagatatatgggtctggtgccagaaatgtgcaggtctgcagggatgagtatgaaaggcctcacctctcctgccttctagagaataatatacagttcaagagccaaagatgcctgagggtgaactggtatgccaagttcggaagggtcaccaaaccacctaatcccccaagtgttagagccaggaacagaagggggttttaagttcagggtttctcaacctcagcacaattgtcactttggctagatggataaactttttgttgtgggaggctgtcctgtatattgcaggaggtttggcagcatccctggcatctatccagtagctattctcctccattccacccccatccttaattgtgacaactaaaatgtctcccaacatggccaaacgtcccctcgagggcaaaatcgccaccatttgaacatcgctggtctacccttacaattcccaaagtagaattccaaggaatattaatttcataagcttctccccaacacaagtattctatggtcaactaagtttgagaatcactgcatattgtaccctcttttggaaattccccatagtagtctattaaaggccctaaaaagttctgcaataagaagaacactatttaattgttttgtttgacctaacatcttgcaagctttctcaaacaaaacccctttattcctatatttgcatctttcagagttcctgttccaaagaatattgtgatttatatatatgttaatatgtatctatcatatatgtatatatatgatatatcaggcaacccaacctttccattgaacaagaggaactgaagcaataagcaagtcagggttcaaaatcctactaagagatgagtgtcagagccatgcatagaagctgaagtcctgattcccagtctacctccttctcttacacaaatgatttagattaatcctcaagaagatacaagatacaagaaaccatcctctcacagccatgtcacaatttggtttgtgaaaggaaagtaaaatcttgggaccctcaactcactatgccaaaagaaagagtgaactttgtcatgcaaaagctgctttctctttgttcctaaacagattgctgcaagagagaaggtcacctatctccccaggtagcctctctcaccctgacaatgtatcttcacaggtaagggacaaagacaagactagaaatcatccctctgcccacctcaagacaaatgcagatctgacttcttcttcctctactctatgtttactttatcttatgtaaaatacaagatttactgagcaggagccgaatgcactattgagtgtccctctttttgctccttcccactctcctgcctttaaatactgaagttctcaaaaccctctttggaaaaagcacaggccacagagtctactgtagcctttatctctttttcctgggctcatcctcaaccttggcaaaatgaacctctaaattgattgagaactctttcagacatgttttggtttataggctccaccaccaccatccagaatactcacctaggaacaacgcctagtgaaacatcagcatttctgttccccaggagaacagacaaagcaggcactttttgcagacatagttgagaaggacctcacagtggtcataacaagggagggtgcaaggaggcgccatccacttacatcatgtccatgcacctgctaatctactataagtacaactcccatgagaatcactaaagctgattcgtctttgtatcaatgcaatacatctttgtattgtggcgagcacagagtgggcctccattaagttaggtggaaggaataaactgttaggcaacacatgctaaggacttgtccatcaacatgccttgattataattcacagatcgtcaccaacacaataaagcctccccaatcctctctgtcctcttcatgattttcttgggaaatattctaccctggcctctccaggctgcagggaactactccttttaggatggcagctccccgcttccctgacacatctactgtcatctcttcacttgcgccagttcagaaagataaaagatcaatttccagctcagatcagccagcccaatgtccctcctgaagacagtacatcaagggaccagtttcctatcattctaggtagaaaacatgcagtgactggtcattcagtctcttgatggtctctcttgccaaaagcaggcactggagaggccatagattggctcccattctcagattgcaaacaatagaactaatattgacagagaaactggatggtatgacattctacaattttgcatggggattgaaatgtaatcataccttgaggcctctggtattccaggaatcctctttcagccctgggaacagaacagtgtcctagggatttctctaatccttttatgacattctaagcagagtgtatggatgcaggaacagccaagagtctcagccagagggcagacctggggccccctcttggtttaccttggctccagccagtccaaagaatacacaggcagcttgcagaccactgagttgagactaagggctcagccctagggcagctgcaacacaaatgcagcagcaactgctagatatttgcagcatgcccctgaagtctggtctgttgtaaaaaaaaaaaaaaaaaaaaaaaaaaaaaaaaaaggccgggagcggtggctcacgcctgtaatcccaaaactttgggaagccgatgcggatggatcacgaggttaggagattgagactatcctggccaacatggtgaaaccccatctctaaaatataaaaaattagccgggtgtggtggtgcacacctgtagtcccagctactcgggaggttgaggcacgggaatcacttggacccgggaggcagaggttgcagtgagccaagatcgtgccactgcactccagcctggcgacagagcaagactctatctctgaaaaaaaaaaaggctcacagcaaagggtgtggaggttgggatgctcagcttcggggcaggagaagcatacagcaagcctctcacacctgcaggactccaggctcccagagccacagctgcactctacctctctcctttcctttccccttctgagcaccttcgggttactgggataaagtagtgcttaatgagaggccaaagggactttgcctccttgaggctttttgattgctttgcacaaaactcatagaatcaccttatgttccttcacttaatcagtcacttatgagcactattctaggcactgcgtgaggctgggaaggccctgctcacctgttactcttactctgttatgctcttcgtaaaatccatcaaaaacaagcagtcatcctgcttctcttatttccccatttcacaactgtggaacccaagtacagccatccagtgtcagactcatgaacttcagaagcagaagcctgaagatgagctttggagtcactgtcacagcaacaagccaactggcatgcagaaatgaagagactcactcaaatgagggacctaaatcccttctatggtcaatgagaaacagaggcccatgaaagggaaaggccagatacaccctcacacaaggaagtggtggcagagccaggcccagacagcagagatctcaaaggtccccattttcaatgttgtgtttcttccatactgtcatttcaaaagagccatttaaggctgggacactctggtcccactcaaaaaaaacaacaacaaatcattaaactttcaacttttaaaaaactaccaaacaggttgcaaaacactttcttatcctacacctgggcgagagagacttacagagggggaaggggcagggagggaagaaggagagggtcatgaatggtgagggggaagggactgagtgagggtggaagtgttcatgattgggatggagtagagattagggagccttgaacctccctgaaggtgagaaaagatcacggatatctgttcatgaatttaaaaagactccgcaacttcatattcagagaggagcaggactcaggaatcaggcaatggtcatgaggtaagtttcaatttttcaaaacaaaggtgatttcatttttaaaaatttgttgtttatttgtcaagagaaactatttatttttatttttattttgagacagagtctcactctgttacccaggctggagtgcaatgctatgatctccgctcactgcaacatccacctcccgggttcaagcaattctcacgcctcagcctcccgagtagctgggactacaggtgcacaccaccacatctggctaatttttgtatttttagtagagacagggtttcaccatgttggtcaggctggtcttgaacttctggcctcaagtgatctgcccaccttggcctcccaaaattctgggattacaggcatgagccactgtgcccagccttaagaaaaactatttcttaagccacatattcatgttttatagttcaagaacacaggtcagtgacaaatctctaggtaattcttcccaaaggaatactttatattccaaaatcactttgcactctgaaagatacctcatctcctcaaaatctttcatagaatcataatttctgtagaatccgtgtatgccttcttttttagttcagccacagcaaagttacagagggttgcaacccccagggaaataacaaatgcgccaacaatatgaaatcacagatgctcagccagaaggccatgtatctgaggttttgtcaaagcaccggaagccacagtagttattatgctcaaaaggtatgtcagcctcaacaccagcatccttcctggctgatcgatttcattttttgacagatgagtttgacaccgccaatcagtggcaccaagggactgtatcataatatcctaatggtcccgaggctgattcccacgccacaagggtaactgcaattccatcaagccacagccaaatacagaatgcctcccatttaggaagctcagttaaactttttatgtcaccaacacgccccaacctcagagttgtcccttcctcactcaacacacgggacatttatcttcaacgtcaccacctagcttcaagcttccttcggcttccccaaccacagtccccactaactacaagctcaggccagcgctacagcctgctgaccactggcaaggggccttggcacatctagacatctgcagccaggcctgcctctcaccttctaggctattttctctgtagaagaacaaactgcttgaaaatcagactgcaccagaacaggcattcttcctgctgctgtggaagtgtgtctcgttcctgtggaaaggaggtatcttgttctggacagtgtgggctggagctgctggcggtcagaacagggaagatcgtgttcaggaagaacaccatccctgagagaaccagtctcccgacacacatctcaaggccagcctgcaccagctcaaccctctcctaagcgagaggctcccctattagcgtgatgcatgtcttggaccattatggattgacatacattcttttgtatgaagatattcaatgctgcacatggcatctctcacgacaggacccccgaacccagaacacagctgctgaggaacaggtgctccatcaatacgggtgaaatagatgaatacgtccaagtgccggtgtcgagcactggaaatacaaggacgataaagacaccacccctgcctccaaggagttttttggctagtgggagattcccccttgttatttgtcactggtggggtcagaaatggagtcaaggtcagcgggttttggactaatctagaagaaggactggatcagtgcttcttaaatgtgttattcacatactcccatcacaacttctgccctagctgcatgactcctatgctattcactaaacatttttctttcaatggagtcaaattttttaactaaacaaagatatcttttttggggagagagtctcactctgcctcctaggatggagggcagtggtgtgatcataactcactgcaggctcaacctcccacttcagcctcctgaaaagctgggactacaggcatgtgctaccacacctggctattttttttttaattttttgtagagatggtgtctccctctgttgcctaggctggcctcaaactcctaggctcaagcgatcttcccgcctcagcctcccaaagtgctgagattacagcaatgagccactgcacccagcttaaataaatatatcttaaggatactccgtaacattaccacatgtgaaaaactggtatcaccagtgaagaaatagaagataaccttcaaaataaacaaaatagaagaaaactttcaaaataaatgcaaaacaaaaccagggtatgaaattctaggtagatgcctccgtttgcatgcagtctcaatgggggctgttctgtgcctttgttcaaaagggagacaggcaagggttaagagatgttcaaacagtaaaccgagactttctccctgagataactagaaagactggaagaaaactggaaatgaactaaatccctccttggtgactcagggtcctgtccatatatcactagaaggtatctgctacaccacctgtggtgtggggaaaccataaagctgaaatgagctttaacatttctttcaacatccaggtcctataacaccataagcagattatttaatgtcaaagaaatcaagcgcatggaagaaagacagcacctaaacaacacaggtctgttgactgaattagatttccaaagtttctggccctcccagattcattatatcctatggtcttcgggttacaaatgaggacagaaaagcagagagagaggagggaatgtacccaacccatccacctggcagtgacagagctcagaggtcttcattttggatgaaccatgggacccagatgcctatgaaaggggaggacttgtaatctttttattcccgatcttagactacctgtgtgtgcaatatgtgtttccaccactttgtgaagttcagccaaatggcccttaagaaatgaaggcaatgacttggtggaggccctgcacgtagagaacgtcagaaaaggctgaattggatccccagatgttcctaagacctgctgggggaagcttgcacaagtctggtccaaaatccgtttgtaaggaaattggtgaaaatcacagcaaagctggccttcacaggccacatacccaggccctgctctcaagcaacatcaggcttggatagatttttccagaaccccagatagagctgggctaacttaacaggttgaattcaaggcgtaccaaactttaaaactggaattggagttgactatttatattacaagaagattcttcactctccaaaagcaaccctttgtcgtctgagcacccctaaagacttaagtgtttgttaacagattactaaccatttggcaggagtgcaagcactaaagaaaacttgcagagaaaggaaggggagggaactggaatctctgcaccattggttcgccaagctttgtgctacatgcttcacttacagtatctcatttaactaatcctcccagcagggttaagaatctccattatacagaaaaggaaacagcacagagaagtgaagtaatttggccaaggtcacacaggtactacagcactagaagcaggggctgtttccagcagcacatgacatggaacttcctaaggaagtgccatttgcattttgttatcaccatctactaaaacatacccctctggcacacagtgcaataactatttattgacatgaatatacataaatgctaagaatgccatacacagtaaagatgaccatatggagcttaaaatttattacaggtcagaggtatcaaaagaaaattatctgaatatgccaggctagcaagggaggggattcttggtgcctaaagtcctactattccagtcttctttctttacacacacacacacacacacacacacacacacacacacactccttcagccaaaatgttccactttagtggagggaaaagagagcctggagccataagtctagcttattgctgatgcctggtgttccccactctgcctcccaggatctggaatttatcttgaccaccagacagagcacagaactccattacctagggtgggccagggctgccacggagcagcattgtgtggctgtaccctccagaaactctggatgtaagatggaaggattgtagtacctggtggacaataggtgggaaaggatggagggtaaagaaaagcacaagacagggagaaaaaggaaggggagagtgggaggatgggaggcaggaagttcggttaaaatatactgtcagtggcaccggataaaaataatagccttttctgtgattgaaagcatttctaaaaatcaaagataggaacagctgctgtgctatggtggtgggattatgactgcttttgtaaatgtcttttaatgttcttatatagttttacagcaggtaaaattttggagcagaaagatataaaaacattcatggatagaaaattcagaacaagtcaccaaggggaacttggtttgtgataattttataaaacagtgttacatacattcctaacctatccccaggccccctgagagccacaaccaagacccattggaccaagcttctgaatttcacagagcttaatgggcttctgatggcaggggctagtcacccacaaagagaggccacaacatacagaggcaggaggcctgcaccggggccaggaccatgctctgtggacaaaatagatgatttcaggcaaatcccttacctggctgactcgggtcgtcttccttaaagtaagaggctgcatgcgatcaggagtgacaaactcaaatgctttaaagagttaggctgggatcacagaactgaatgggccatcagagcctatggtggcctggaaatcacacacccggaggccaagggtgcagctgctacccagacctaggtgaatgctgggccccatgctgccagtgtagagaagttgggaatctatacttttttaaatgtttggtttaattttaattttttttgtttttagagatgggatcccactgtgttgcctagagtgaagtggtgcaatcatagctcactacagctttagactcctgggctcaaagtgatcctcccgcctcagcctcccaagttgctaggactagaagcatgggccgccacaccagaagaaaactagactttcatgtgggctctaatttttctgttggcatccagtttctaaaaaacgtagtaccaagcacagtgcctgaatctgtaattccaacactttgggaggccaaggcgggcagatcacctgaggtcaggagttcgagaccagcctcaattaggagaaaccccgtctctactaaaaatacaaaattagccgggcgtggtggtgcatgcctataatcccagctacttgggaagctgaggcaggagaattgcttgaacctgggaggcagaggctgcagtgagccgagattgtgtcattgcactccagcctgggcaacaagagcgaaactctgtctcaaaaaaaaaaaaaaacaaagaagtacttcaaatgtattatctcactactctatgatatgttgtaagattggccccatttttacaaatgaggaaactgaggctcagagacattaagtaatttgcccaaggtaacacagctaaaaaggggcagagccaggattggctactacaaagtccttattccttctctccacaacattttattaagaaaatttcaaacaaggccgagtgtagtggcccaggtggctcatgcctgtaatcccagcactttgggaggccaagacgggtggatcacctgaggtcaggagttcaagaccagcctgaccaacatggtgaaaccccatctccactaaaaatacaaaaattagccggggtgatggtgcatgcctgtggtcccagctactcgggaggctgaaacaggagaatgacttgaacccgggaggccgaggccgagcccagatcatgccactgcactccagcctgggcgacagagcgagactctctcaaaaaaagaaagaaaagaaaagagaagagaagagaagagaagagaagagaagagaagagaagagaagagaagagaagagaaaagagaagagaagaaaagaaaagagaagagaagattccaaacatacaacaggttgaaaggatttcacagacaatacctgtatcccatcacctagattataccataaacattaaattttactgtattgctctatcacaaatctatccaaagattgtctcctttggttccatctgaaaagcaacctagaaagtacgttagaggtggagcccagatgttgccatttctgaattagaaataatttggcctcttctgaaacccactcatcccattccctttgtggctggggagtatgggggtgggaagggggcaggcaggaaggagagtgttgatccaggaacatctgcacacatcatcacaacacacatcccaaccagctctgatttctcccctggctcaaagcagggagagatgggtatttgggaaaagctcaccaccccaaaatatctccctaaaccctgaaggctaagtcaacccatgggctctctgaaagtggccaggggacagcaggagaggcagtactcggaaaagggcagcggtacctatcttcggagccctttcacctgctccagtgggattttattctcactctgtggccctgatacctcctgtgtcttttagctgcattcgtgggatgggagggttgtcagggaggtttcccacctggggcctcttcgtacacctcaaggggataccatgcccacagaatgcaatgtgaatggtcctcctggagtcctgcagagtggtggcaatcttcaagtccatctgattcatgcaaaagttgttcgagcataaacagcagctttctccagtgtcccacgcacagtaaagaccctgcaagagggctgcctatgaaaggccttggggccagggcgggggctgggagtgctggactctcaattctgacaccatagcttctccaccacttcttgctatgtgaccttaagaaaccttcctatcctctctgggtcagagctttacaaatgacgccacaccaaaggaaaaaaaacaagcaaattctggccatctcctatgttcaagacagtgggccagatgctgggtggaggggaaagaggcatactaaggagctcagcagatacctcagagccctggtctaagcgctttgcacgtttttaatactgacatcaactctacaaggtgggtgtgacttttatccacattctataggtgagaaaactcaggaggagagaaattaaaactttcctaaggccacagggttaagtaagaggcagagcaagggtgaaacatgggcaacagtttcagaagcctgcacaggtgaccaccacaaaacgctgcttgctagagaagcccaagaccccctctctgacctccaggaagactcggtccaggggagggagcaagacaaaagtgaagatttaaatgctgataaaatatttaaataattctttgagataatagtgggaaagatgctgccagggagaacatgattaattgtcaaatgaaagtgttcagacaaaattgctctaacggtccagaaaaggggaggaaaaaaacccctctaccgtgagctcattctgagttggaggaagcctgggaggttaaatgtcactggcttttgcagagtgagcaggacttgaacaggagagagtagggcagaaagcattccagcaagaatcaaaattctttttttgtttttgtttttgtttttgagacagagtctcattctgtcgcccaggctggagtgcagtggcacgatcttggctcactgcaagctccgcctcccgggttcacgccattctcctgcctcagccctccgagtggctgggactgcaggcgccagccaccatgcctggctaattttttctgtttttttttcagtagagacggggtttcaccgtgttggccagggtggtctcgatctcctgacctcgtgatccaccttccttgacctcccaaagtgctgggattacaggcgtgagccaccgcgcccggccaagaatcaaaattcaaagggccagctctcatgtttggaaaggtgaagggccctgaacgactgaagatggctcaggggtgcaggaagggtgagctgaggctgggtctgaactttgccttataagtaatagggagtcatagaggaatttcagtagagtagaggagcatcatgacccaaatgtctgctgatgacacactggatacactaggggtgcagggagaaaattaataaattccccaaagtgttggccaaggagtccttgggtcttgacagaggaaagcaagaagttaaggtcatgatactcctcagagactgaccaaagaaggaagaagggggatacttcagctggaagtcttcagctgggttccatcctaaggactttagaatttggcactctgcgtcatcagggaagcaagtaaatatgatccaaagtccccccaccccctcgcagggttatatccagagaacagaattttttaatgctatttttaatctttctgttgaccaaaaacacactgagaagaaatgaagcatgaacatcaacaagaggctctacaaactctctcccctctcttccctcctgttaaccactctgcgaccctgcagactcaccatatggtccaccagctagatggccccttctgatcctggaagggctgatccgcttaattatttggcagctataaatagaagcattggacaatagcctgagatcttttttttttcttctttttttggtcttgcaaacaaagagagggtccctagttggcaggattggagagtaggatttcactccctccctccaggccattgtcttccacctgagccaccacagcctcagggcggcttcagaactgtcctggatgagctagggacagccctgtctcaactgcgccagcaaggagatgtgctggggtcactcacagttcttagagtcagggtgggttttaggaaagagatcacccaggagactcgaaaggtccgtttgctttaggcatgtccttgcctatggggccaagacctcactctagccacccacagcttttcctaccttaccactcactgcacccacattcagccttcactctcacccccaccccattcccaggcgagagcagccacctggaggaatggactcctctggatccagagccaggaggtgagcagagcaaatgttcccagtgcctgcaggaggaagccaggcacccagggttccccttgccacctagacccccgccacctccccatctaggatgggctttctctactccacacataagcactctcctgccccagctcctaagctgttctccctacccctaatcttagcagggacctggcatggaagtcagatgagcctggcttggcctcttgggtctgctactttactagttgtaagatcatgggcaagaggtttcattgctcagtgcctcagcttccccacctgtacaatgggcacaataacgatactgacctctagggactgcttatgaggacctatcgagagagcaggtaaaggttgtcatctagagcctggcacacagcaagtgcttgctaaggggtgttactggcagcttttctctgagtccaactcccatcacctatatgcatgggactcagcacacatttgctaagttgttggtttctccacgctcccctcctcctccttcacacccaagaggaatgaccaggtggccacaggagtcagcatgtttgactttggtacctggggctcctgaccatccagtgtgaatccaaacgcatttccctgactgtctgacacctgctgtttaatctccatcaccttccctcctcctacctggctcagggtccctcactccgcataggtggccaaggtgtgggggagagccctccttcctaatgcttgtttgttttttcgctcatgtgtttgctcagagacaggataccatggtgacacccacgatccagggtggctgggtacacacacatagacagggaaatcaagtgaaagaaaaagcccatgggggccaccatcatcccacgaggggccagactggctcccaaaagagggggaaaggctgtccctcccaggggcctacatatgttttcccaatggaaagcttttctcagtggtcccggcaggcttccaggacactcctgcaggccagggactggtttctgtttgtctagaagccctgcattcatggtctagcatagccaccaacctccttgagatccatcactatccccccatcatgggcatctgcagagcattcatgggttgtggtcatgacttggaaaattattcttaggctgggagtatggctggactaggcttcacagagaacacggagggcagggtgagacgctgccagttggagagaatggcagcccctcatgaagttcagagaccccagcacacgaggaatctaccctgcctggcactgcattggctctcgtggaacatggagggagtgggctttggaatcagaggccagggatcaattcctagctgtgccacttcctagctaggtcaactgtgctgtttcctttaacctttctgagccaaattatttctaattcagaaatggcaacatctgagctccacctctaaagtgctttctaggttgcttttcaaatggaaccaaaggagacaatctttggatagatttgtgataaagaaatactgaatgctaaaatgaaaataaaaatatcttctgcagaaataagacctagagtttgatagatcagtagggtgactatagtttagaaaatattatatatttcaaagtagctagaagagaataattcaaaggtttctagcataaagacaaatatttaatatgatagatatcccaataaccctgatttgacctttacaaattatatgactatattaaatatcacatgtacatatgtacatttattatttatcagtaaaaataaaattaaaattataaaagggagagagacttcctgcatatgaaatagagattacaaatcctttctaagtacacatgggatactgacctgtatgctaagtcattaaaaaaagaaatccttctgcaaaggaccgttttgagactatgaggctctaatttagaaaggtgacaagcacattgcaggaccttacttaatagggctggggcttgccagcatacaaaattactgcagtgacttgttcagactcctgcactgggaaaagacttagtccagagacttacccaatgttttgccatagtaaattctccaaggatgaagaaaggaggaggagagaaagagaacttttctctgtcttcttcaaaagctgtagcagccagatgaagtacggtgtaggtggccaagcagccagatccctaaatagcaactaatgactttgattgaaattaataatgaaacgacacctgttagctcacttgtagccactttagtttgtcacatggcaattatattcactatcctatcagctggtccatgagctgtaaaatgctataatgccatgccatatgcctctcttgtctcccatgttgagacgggggctgtcctcagggtggttatcaattccaggcctcctaaccactctggagattgtcctgggaacttccccggcattcaaaaagacttgaggaccaccagccccagtgaacctgctgagtcccagggagcagctgggcagcctctttgaaggtggattcccccaccgagcaagaggaaaaacacacccaagagttaccgagtcccttctgtggttgggtccttgaaaagccttgttgggtgatagagggaattctccacttgagcagtgaacaacagtgtcaccatccacattatctccccagacagaggcaggacataaagaactaaacaggcccccagcaggccatgagatttggtttctatagcaacccaactgaggttgcatgagtgcctatgagatagatgcccaaggctcaccccagacagggccagaattccagaatcccaacggcaaggaccacccagcagcgtttagagatggaaagcaaggtttgttcatgttcagaaaaacccagggaagccacaggaaaaaaatggggctaggatccccactttctataaggcaagctccaagactatctggcagcccaaagctggcatgcagagctgaggcaggccccacaggtgagctgagccacgctggggattttaacagaaaataatcctccatccacctctgcatcgtccatattctctctctctctctctcacacgcacatacacagacacacacacacacacacacacacacacacatatgaaaaataaaaaaaatcttgcaattattcaaaagaaactatggttgatttgttgatcagaaaaatatcaatgaatgaccaattgcaacaaggtccaaggtcctttaatgaaagtttctaattaaccctacctttgaacacttctattactctatctgtagagtaattgttattttagcgatgcaatgtttcctaataagaccaagcattgggagaaagggaggaagggagggacctgaaacccaaacccagccccaggtacaagctagcacaattagcagccagtgtactggcttctcgaatgctgatatggaatagctcaggaaactcaatcccaccagggacctgcttactgtccacagatgtcatcacagtcatcggtcaagctgagagaggctagcgcaaacaggcgatggggccgctctatctctcctcctccatcaaatcacaaaatgccatgacaacacccaagccagggcctctgaggacacatgaaaggaaatccaacttcatgcaacagggactcaaggtatggcccttttcggccaaaaggcagtgtgggctggagagagagataaacacaagaggctggaaacacagacagggtgagtgggaaagcttagaaggcacttagcaggtaaggctggcatcgggagggagctggctggaccctaatccctgaaacctctctccctgaaacctctcttcaaagagatctacactttctaaatcctgcctccatgagatgaaacttctgttcggtgtcccactcttacagcccctgattcccccagggcctagctaaggaggcccttggaccaccagtgaaactaaacagagtcactgcctatgaagtcccttcagtctggagctgtctgaggaaacagataagccatccaggccaaagaccagcctttcaccatctgaggggctattagatgcccagcaaatatgggttgcctagctggtagcttctggcccagatgccagtccaagagctagagtggcctctccaagcttgggagttagggaagctgtacccagatccttggcacccaccccaaaagagcccatgaagagaaatgaatgaaagggcccagggagattctcaaggccccggtcagccgccctagaagtcacctcaatcttagtcaaggatgagctgagccttgaaaatccatactctgtgcaagaagatgcagataatctgcccagttgcccaaggcaataacttggaggacaaccaacaaaggccaatgggggtcacttgggaagacacatccctaagttgacctgacttccttagagtgggcaggaaagacaggcttcagaagatagctagaaagtaacaccagagaaggtcaccctagaggtggcccctggccatttctcaaggtgacagcctctctgcccaggcgtccacactgcaatgttttccatattggcacttccttacaaagtcctctctttctacctccatacctttgttcacactgttttgcttagctggcaagttcttcctgctcctctctgcctaccaaagccccacttgcccttcagggtcaggtcaaactcaagctcctcatcaagctctgcatgccatggagatgtgctgcccccaacctcacctcgaagaaggacttgaggcccagcttcagggagacggctttgcaaacagcccccagctgtcggttccttcaggctcagcctcagctacagcttcagccaaggtcacccttcctgggacagcctgcatctggtgacagagtgaggtggggtacagaagcacagcaatttgggcccaaagggatcatctctgttggataaatccactccagagttgtctgctgggttggccgaggttttgtggaagctgcatcagctctcgacttgtccctcttgtcactctggcctctgcctctcccttctcagaggtggattcctaataaacatcatgagctcaaactggtctccaccagtacccatctcccaccagaaattcaatcaatggtcattattattatagcccatgtttctgccacaaaaggtgctcaataaacctttgataaacacatgagataatttagcatttctacttgctgacggagctcttgcagagcctgccactctttcaggcacactcacagcagctgctgatcaggtagaccaaatgacatgaggccaatgaaataaatatgccatcacaagagcatggcttcctctggctccctaggaatcacacagcatgctggctcctgaagaacacacaaggagatgcctcacctgagaggttttggatcctgggatcaagaacaggggctcattggtacctctgtgtccatcctaaatgatggctcacttaagaagtgatggaaggtcagctttagtgacaccttctcatcagcaatgctgctactaggtgccaacagcatctctcaccacggcactttaatcaggatggcatgacaccactgtaaatattaaaaaggttataattagagacgcagttaaaacaaccgagggcttagtgttactaaagatatttgcagaatctggtgcaatataaatagcagggtttacggtgtcatgcctaaaattttgagcaggctgatgttccaaggggatgttcagtgaatgcccatccaagctgggatttctctcaactgattgttttctctccagtgtcagagttctcagaaatagatatccagagtgtgcccattctcataaaggggtgaaaagaccttgctactcaaaaagtaggacaaccttgcaccaggacacccgttgaagctcggtggggcagctgcagcccctcaagctgctagaaacactgtctcctgcatggagaggtcacagccttgtgattccatcggctccaaatttaaagcaatcttgcagaaaagggccaacatttatcagaatgaggaaattgttttctagggtgatatcaactggagtctgctgggtacacatgacacagagaacaggcaatcaacctaccaacaaagacgataattgtcacagtgcctgccaccggccaggcctctgcacacattcactttttcctcaccacaatcttacaaggctattgttgacatagtcactttacatatgagacaatcaagactcgcaacatcataaaactgatcagcagcgacatctaaatttgaattcaggtctgtccaattccagggttctttcagatgtgagaagggaggttcagaaagggcccctttttcttctccctccgtgtacttctgtattatttgaaatttttatcaatagtatattttcttgtattactttttaaatcttcaaatcatcaaaaagaatttatgggcaagagaaatggtcctatttctgttgaaaatgtatcttaatttgatgtaacaaaatactactaacaggccgggtgcagtgctcatgcctgtaatcccagcactttgggaggccaaggcgggcagattacgaggtcaggagatcgagaccagccagactaacatggtgaaaccccgtctctactaaaaatacaaaaattagccaggcgtagtggtgcatgcctgtaatcccagctactcatgaggctgatgcaggagaatcgcttgaatccaggaggtggaggttgcagtgagccgagatcgcatcactgcactccagcctgggcaacagagcaagactccgaaaaaaaaaaaaaattacaaacagccattgaaataaaaaaaaatctgttctttgctacaataatttcatttctggaaacctatcctgaaaaaaataagcagagacaccaaattatattaaataaaaaagctgcctttattttgaagtgttacctttaataagaaataaactggcaagaaactcgacacccaacaacagaaaataaagactggatatcctcatgataaactagggtgatgctattaaaaatagttttgaaatgtcagcaaccacaaggggaaatgctcattacatgtttctaggtttaagaatcaataaataaactaagtattcacacatgtaaatgctggtatatgcatccctcccaggacccacaggcatacaaaggaatttagaaagagtagacatctttggagagaggtttccaggattagggtgggtggggtagggtgggcagaaaacttttacttttcattttatatttttataagttatttcaatgtttaccatatgtgttacttttatttcatttcactttttcaattttttttttaatttttaattttttttttttttttgagacggagtctcactttgtcgcccaggctggagtgcagtggcgggatgtcagcccactgcaagctccacctcccgggttcacaccattctcctgcctcagcctcccgagtagctgggactacaggcacccaccaccatgcccagctaattttttgtatttttagtagagacggggtttcactgtgttagccaggatggtcttgatctcctgacctcatgatccacctgcctcggcctcccaaagtgctgggattacaggtgtgagccaccacgcctggcctatttatttatttttaatttaaaatagagaatgtgtctcactctgtcacccaggctagagtgcagtggtgcaatcacagcccactgcagcctccaactcctgggctcaagtggtcctccaccatgcctggctttattattcatttatttatttatttgagacacagtgcagtggcacgatcttggctcacttcaacctttgtctcccaggttcaagtgattctcctaattcagtctcccgagtagctgggattacaggtgcccgctaccatgcctggctaacttttgcatttttagtagagatggggttttgccatgttggccaggttggtctcgaactcctgccctgaggtgatccacctgcctcggcctcccaaagtgctgggagtacaggcgtgagccgctgtacccagatttattttttaaactaagtatattttaaagctttacatatattatgtatattaaccaatatacatattaacatttatatatattaaccaatctaagttttcagaataacatttcattatataataataaaatacacccaaatgtgatttctgcattgcagaattacagacattgctttctctttataatttttctgtatttgccaagttttctcccataaaagcataattttattatcataaaaagcctccttttcaaaactttaaggtatctcactagtaagaggatatactttctctaataagagtttgggtttcaccaccagtcatgtccagcctcagacccacccaaagagtcatactatcatgagtacaggggatagaagggccccatgagactcattccaggaggttaccaaagtagtagacctgaaatggtttggctctgtgtccccactcaaatctcctcttgaattgtaataattcccatgtgttgtaggagggacccagtcaggggtaacagaatgatgggggcatgtttttcccatactgttctcattatagtgaataggtctcatgagatctgatggttttattaaggggagttcccctgcacatgccttcttacctgctgccatgtaagatgtgactttgctcctcatttaccttctgccatgattgtgaggcttccccagccatgtggaactgtgagtccattaaacctctttcctttggaaactacccagtctcaggtatgtctttactagcagcatgagaacagaataatacaagacacaagccctactggcttagcctagagcctcagctgaagccacagccctcagccctggacccctgagatacaagaggagcctgaccagtgacatcccggaattaaacagggggagaatcttcctcttattgtcatcctgagcaatacactagacaaaggccatcgggcagataaaaagaggaaccctgtgcccctgaagttgatctgaccaccagcgagaggtcacatctgctatgtgcaatgccctgcaggggtcacaaagatgacttcaacctcgaccctgtcttcaaaggagagtccagtccaggcgagtaggtgagaaggcatgtaccaactcaaatcccaggtagaaagtgagcagagcccgaactacagaggtatgaatacagggcaattgaagttcagaggacgaaagctcgcttccagcctagggtgcaaggacagcttccaaaggaggtgattcacaaactgagtttgaagtctaggtgtattcaaatacaggccaagtgtgcccctgcccaggagtaggcagtctatgcaacatgtgaatcacatgttcaagcacctgcctcacctgttttatgggcaagtctgccagctacagtcctatcagggcacctatatttctaaggacctggatgcctggatgttttttctccccagggcatatatctcaattacaaacctgcaggaaacaaaaagtttgtggagagtcacaaaacatatttgaaatgtataagactttcaccacaggaaactaggcctaacaagtattttcctgtggaacacccctggctttgatgaaactccccattcaatgtctctttcctcctgcaaactttgctaatagcagtgaaaataaaagcacagatcctatatttacttaatgatcttggctgctttagacatgagatagcattccaagagagcaaagtgctttttaacaaaattcaacaagaccctgccctttcccccgccctcccacctggcctctggaaggaggaaggaatttctcattctctgatcttttcgcctgccatgacccccagggcaatccagacagtaagactggccatgcctcctggtcatgtcccatacctcatgtcctcatgtgagaccccagatgggggagatgatcacatttgagttacatttgaggcggagattcaggtgggggcccaaaacatggctgacatccagccagcattctttgctagatggagctgggaatggggggttaacttttgtgaaagtttattagagaataaagtaagtgagttaattaaattggagtgtgaaagacatttgggtggtgatgaggaggcgaggtgatgatttatttataattgacaaggttgcatctagctactgggatagtaattatacactttataaatgcgcaaaaaaagtcctttcatgcgatggaggtttaagggaaaatcctgtcagggaagtttctgtctgcccatgagtatgacaccacctcaagagctgttggccacttggcttctgccaaccacagctgtaagttggggactgaataatctctaaatacccttctaaaaatgaggccttttctgggaatcagtacttagcctccatctgcttctgatgatgttttcttatctcaattcagggacaaagagggatcctttatcttgtgtctgattctttgtttttgttttactgattcatattcaagttccagctcttggatcctccctaatcaagatgataagaaagatgctgcccaatgcggcatctcatttaagggtgagcagatgtgaattcagaccctaaatttgggaaagttccttaatctcatctggaaaacagggatgggggtacctagctgacggggttgctataaggacagaacctggtgtaaaggcaagcctggtacccagttaacactcattatcatgcaccttaggttaagtcatggtaaaggaaacgtttcaggttaacttcagtcccttgataactggggattccagcctgacctgtttgcatagagtctagcttggcccctgtgaccagcatttgcctctctaagggctcctaagcactcagttttaaaatccaatcaagagtatttccagagataagccacgacatcattagaatacagattacagcatccatcttctgacacccactgagaaattctaacaagcacaagaagttccagaatgctagaggtaaaaaataaataaatataaataaataaataaataaataaataatcttatctcaccattcaaagattctccaaagaagtagcatggactagatctctcctcccacctgaaacaactaaaaattcagacaagacaatgattttcagacactggagctcagtcaggggaagacagcaatccctgagagaggagaaacgaagtgagccctacagttgcctcaacttcctgtctggagagagcgtccaagtcacagcagaaagaaggaggaccccagcagggcccagatgtctccctgagttgaggagatgaaggctggattccagcaaggccaaggaggctggaattcacaggccagggcagcaaaaagaactgcccagtgaatacttgaggtcagcagagggacccccttgagtctttagctaagtattggtggacacaggcatgtgtgaaagctatccaaggtgggggagagaaacaccctaaaggagcagacagaacatttcccagagtttatacagggctgggaacggttcaccttcccaccagccagagtggaaacctcaagctcacagagcacctggtagagtactgagaatagcagcgtctctgtagtgggaaaaaattagccctagattaagagagctctggttccacctaataaagctcaaaggcaagacccaaaaaagatcaaactgtttccatacaacttgatcatgtcccagaaaataagctcaagaatgttttataggagtactaagatatccagcaaccaacaaggtaaaattcacaatgtctggtatccaatcaaaaactaccaggcattcaaaaaggcaaaaaaattgaacccataatgaaaaaatagtccatcaaaagactccccacttctgcaaccacatctacagtgtatttcaggacccagccatagagcccctctggtcctagaaatgcatttcaaagtgcctctctagctctgtgcaagagattttctctttttcattctaaagacagtaatcctaggtagaaacaagagagagaaaaaaaacagaaatgctcactttctagtttgtttctctgtttgctaacagtgtcacatttcccaagcagtgatactctcccatctcgttcatcttctaattctctgcctataattttacaaatgtctgtggctatctttagcagttttcaccagttttgtgttttagccacctgaccccctttcactctaccctaagttagatgactcctcattcctcattcataaagttctgtctgttaaacctagagttgatcagcgatcacgatacacgaacatgctctcttcttcagatgccctcacattttccttctttacttggggattaacaatttaatttttaattagtggagcatactcaaaatgtcatggttgcagccttccatcactcttgggctatattctctcttaaggtcttcatatggactgctgtctaaaacaatctagaagagcaagaaatccaaaaatgggcccaagtatcctagggctgtggatccaaggcatccatccaatgtgaactagataaactgcagtctgtctgcaccattgatctttctgagatgagggcacctgaaagagtgggccaagccactagaaccctggaccctccaccacaggtaccttgtggcagttggctttaacttcctccctatccttgccatattaatcttcattccctgtagtcataaagttctagaagaatatatcagctttgatctctttcagttattcatgcattctttcatttaagtaaacagatatttactgagtacctaccatgtgcttggcaatactttccaatcttcagaaccgggctctcacaccaagcccaagcacaggcagctacccttactcctactcaaaaatgtgaagaggctgaggcttctaaaatagaaaaagtcaccagctcagggtcaaataattaatggaactcgaacccaggactcctagacccaagcctctcctggccaagtctcattcactgcaatcacaggtccagcctggtcacgatgatgagtgggactgtaccctgccctccctgcccagcccattctaggcttcctcagaattccctactttgagtgctcctttgccatgtgaggctcagtgatttccttctccgagtccactcacatttgataggctcctatgaaatgtaggtgagcttcacctgaatctgcacctgtcctcattgctaaggtgatgagctagtgtcaagaaaggctgagggatccaaggatgaactcaggcagggcttgaggccactactcccggttcccctcctctcttccccatgaatcaccttcaaggacacttccatcaaacctgactcacacagaaggcccagacctgagaaatgaccagcccctgggccagagcagagagccagaaggcaattccctcccccatcactgctgcactgggtggaaattgggtcagagctggccagcccattcatttaatccaaacgccccctttccattcagctcttagtcctcagagctttcagtccaaggaagcactatttcctctgcaaaataaacaaaataaattaagcccatgctctttgatctcagggcttttgtgtggctgatgaattgaacagaaatgatctgccatcctcctggcatctcaaagacactgcaaaaattcagctgtagcttccagccacctgccaggcactgtgctgacaaggaagcatggctaaggaaggcactctttgccacccattctcccagggaagcaagaagagtctgcaggaggcacgacaggggaagtcaaaagagtcaaagactgtgaggcaggattcgtctttggccacataggcatggattcttcttcctctgctcattcccaccccagggactttgcactggcttttgtccccatgtggcatactttctctggagaccttggaaagctggctccttctcatccttctcatgtcagcttgcacaggacctccggagagaaacctttcccatcaaaagtagcccccagactctacccgcatcactgtctgccagccccctactctattatctccacacttatcataatcagaaatgaccttgttgctgcatttgttctcttgtttgttttctgtttccacttctacctccgtgacagcagggacatcatctatcttgatcagtgccatatccccggcagttagcaaaacgtctggcatatggcaggtgcaaggcaaatgtttgctgaaggagggaggctgcatggaggagactgggccctctttccagtgccagctctgcctgcatcgagcactatgtggcgcatctagaccaggatccacatccatggtgtggtttccccaggctgcagaagtgcactgtggaagcaggtctgtgtgcttgagatcagggaaagctgaccaagaagatgggacacagttgattctggagaggcagggaacagacaggggactctcctaacaggctggatcttccaggacagttgaaggacaacatccagtaggaccctagaccaagagtatagacactgtcgctatgggtgtttctctgagccctgagacttcccatgtttaagataagctggttggattactggttattgattatgttgaatcttttggtggcacagaccaacttgagaatctgaagatatcaactttctttctggagaaatgcatgtgcttacatagagacaaaatatgcctgcacttcctagaagggcaaggacccctccgaagttcattcacagccccaggatgacagcctctcacttaaaggctcttgggccgccctgctagtcattggcctgcttgctctgagacccagtctttacccctcgtctgtagactgtggactacactccccaggctccctcgctctttcttctagggaagtttgttctattcagcaggaatgcaggcagaagtctgcagggtgggggcaggcagaaaccaggacatttctccctccttctgcatttggtggcatctccagatagagaacatgtccatcattatatctatcacctctgggtatcctgccctccccagagtcctttcctctgtgatcctgcccagcccagcaggccttctgtagttccagcatccgccaggtgctgctggatcctgagttctagaaaaccagctcctcccttccccctctagccctaggatgctagcagcttcctgccattgctattctctgggctgcctctccattttttgcttggctttttatctccttggacacctttataactagttccccatataaactccttctactagatattttggcatgaactctgggtttcctctggggtccctggtgggatcagcctccctccagcacgggcattctgagagcctggtagcttcctggaaaggccaatctgagctgaattaacaaatccctaggaaggtcaagaagatggaggggctgggaaaacccatgttgcctgcgagtgcagtgcctccatcctgtctggttccattccaggaaaaaaagttatataggaaaagcctcacaatcgcaatgtagttaaaaactgtttactgcctttttctaaatgagggaaacaaatgtaaggcccagagcagcctcccatcaaatcatgctcttgctcagatcaaacggcagcccgagtgaatattcctagagttcctacttgggagctcacgctagctactaagtcctccctgccaaaaagacccgattatacaaagtggggcagcaggaaagccagtcttgtagcatcaaagaaacacactgtctgaattccatcagccacaagcaggcatcctccacccagggataatgcagccagggcactgtgccccagaatggccccacccatgcaggagggcaccttccctcctcactgtgctggcttcttttaacaaatagccctatctatgagctcccttgttccttccaaccattctaaagatagggcaggcaccaaggccaggggtatgggcaggtcctcctccctgaggaccaaggcacagagagtttccaaggccacacagccacttggaagcagagctgggattagaaccctgcctggacagggaatgacttcaacttacacacatgaacaaacacgaatctcaactccctgttatggtggggttccccagacacacatgcatggtagagatttcagtgcaaatttaatcatttgaaaatactgacattcaaccattttttaacctcaaaaatggcaatttcatgtggcttacatgaatagtttatttgggtagtgatcccaggggagaaccagctggggagtggggaaataaaatgggaaagtgagagggcagggtttgttaatggtcaggacactgctgcagacaaccaaggctcaatgccactggagacctctgggagatggggcagaaccaccctgtccaacatggaaggcaccagccacattgagctatctacatttaaattacttgaattgaaaaacttagttcctcagtccactagccaaattccaaaagctcaataaccacagatggctggtggctatcatattggacagcacacatacagaacatttccatcattacagaaaatcataggggtagcactggcatagaccatgcctcagagctgtgtcatctgaggggtagaatctggggtatttatactcccattagggtctatcattggcaagggctgcacctgggggtatttgctgcaggcacttccagatgtcttggctcacactggtagggggagggaaggcactgacagtaggggcatttgagtgggataggaatagagtggcctgggggcatgggcagggcattcacagcctctgccacaatcaccagcccttcctgcacatcacctctgctcttgttgaagcacctctggatgcaggcattttgacagcttcttcgcaatgggaatgtggccccagaatcctctgacctgatgacaagccattctccctggagacaacacacagagagagacacaatccaggccttccaagcatttgtgatctacagcaggcagctgggacacagaccacagcatgcagcaactatacaaacactgactaataagctaaaatcggaaatctttatggagaaacccttgtgagcagtgcctggctaacagcatgtaggtgttgcctccaagaactgtctagcatttgagagacacagttggagactgagcgtccccattaggcaggctggtccccgaatacccacattattgtggtaatcaaaacacagctttgagacatcactgtgctggtcacaaacctggcaaggtcaagaaagtgctctgaagaccagcacccaaaatcttcacagcttagccttcctcccaggggcccgctcttggcatagcacagtggccagaacacagactctctggagcccactgcctgaggtcatgtctcatctcctccttcctcactgcgtggccttaggcgcactatttgatctctctgagcctgcatttcctcatctataaagtggacacaataacaataactttccaatatggttgtcaagaaaattaaatgagcccatgcttttaaagatcttataagaaggatggcaaactttttccataaagagccagatagcaaatattctatggcattgcaggtcacacagactctcacaacctctcacttcggtccttgtagctccaaaccagccataggcaatatgtaaacaaatggatgttccaataaaactttatttataaaatcaggtagtgagccagatttgccctgcaggccatagtttactaacccctatcttagaatgattcctgctctacagtgagtgctatatgaatgttcgttgataaagtctgctgcgctctcccacctctcagattcttcctgtattattattctctctgcctccctctccacccatcctttaagaccaagctcaagtagccttcctgaaacagtgtggagatttctcaaagagctcaaaatagaactactattcaatctagcaaccccactaatgagtatctaccgaaaggaaatcattagaccaaaaaaacacctgcactcatgtttattgcagcactactcacattagcaaagtcgtggaatcaacctaagtgtccatcaatggatggctggataaagaaaatgtggtacacacgtgcacacacacacacacacacacacacgcacaccatggaatattactcagccttagaaaaaaaatgaaatcatgtcttttgcagcaacacagagggaactggaggccgttatcctaagtgaactaactcagaaacaaagtcagacagaaagtgatgggtacactaaaagcccatgttgtcacttataagtgggagctaaactgagtacacatggacatacagaatggaataataatactggagactccaaaaagtgggacggtgagggggtgtgggataaaaaattacctattgggctgggcatggtggttcaagcctgtaatcccagcactctgggaggccgaggtgggcggatcacctgaggtcaagagttcaagaccagccttgccaacacggtgaaaccccatctctactaaaaatacaaaaattagctgggcgtggtggcatgccactgtaatcccagctccttgggaggctgaggcaggagaattacttgaacacgggaggcagaggttgcagtaagccaagatcacaccattgcactccagcctgggtaacaagagtgaaactctgtctcaagaaaaaaaaaaattacctattggatacaatgtacactatttgggtgatgggtgcactaaaagcccagactttaccactacacaatatatccatgtaacaaaaccgcacttgtactccctcttttttttttttcaaaaaagaggcctccctggaccctccctcttttcttagccacatccttagaccacttccaagttgctcttctgtggtgacccttgccccaccctgctatttgtggggcaacttgtttcgctgtagaatttcattgttcctgttaaatgatgagatgatccaatgtcttcattttacagggagggaagcaaggcccagagaagccaagcgacttattcaaggtcacacagtgacggcagagtcaggaccagacatggatgtgtcttgattcatgattcagtacagtcttgggcttaaggagatttcaatactgaggagagtggggacacagatcacccagccttctacccttgatttagggctggactaggtcacccctccacagaggttccttacttcctgcctcagcacccctccaggcagaacacttacggggcttgttgccccaactagacaggtctggctcacttctgagtctgtcacatatccagcatgggcccaggcacgctccagatgcaatagtgttgaccctgtgtgctttgtcttcctcttccttccccgtgagtctgcccattgccccggggacacccaggacagactcacagatcttccccaggggacatgtcctgttcatgcctatctaagtcatcaaaggcaaattccagagcagcctatagccagggctgtgtggggactccccactgactatggggcttcacagaggcacagcccaaagtaccatgctcacagacacacaaattcagacacacacatgcacacacacacacaagcagacacatgcacacactaatataaacaacacagacacacatacacatacacacggacacggacacacacagaaacatgcacacactaacataaacacatacatgcacacacatacacgcatgcacacaatgaaacaggcacacagacacatgcacactaacataaatacacacagcacatatactcagatagatgcacacacctaaacacaaatatacacatgtatacccacactgatgctaacacatacacacatgagcacacacacacatacacagaaacatatatacacttaaatacatatatgcatggagaaacaaatgcatacatgtgcacacacacacttagacgtaaaaacacatatatttacaaacaaacacaaatgtatgcactcaaatagacatataaatacacatgcatacacacagacatgtaaacatacatacacgtaaacatacacacatctatagatgctcatgtgctcacagagacccttatatacctatgcacacatggataaacacacacaccctcacacatgcacttacacactgtgtgatgtttttagcttttacctttacagacagacatgggagctttccctggaagatgtaaggtccctgggaaagggactgtgccctgggctctcccccgggagagagtcccgcccacccacagcatctgcctggtgtcttgaacacaactagtgctcacgtttcctcaatggacggatgaatgaagtcgtctcatgcctgggccttgggtccatggggagagcttggctcaggaagccggtgctgcctctatcacctctgagtttccaagccatactctctcaccccatcccagcttgggaaacagccagcatcttgctggcctcttggtggagtgttgctgatccatgcctctgccagaggtgggagaaacctcgatgaaactcaaaccaagtcttgacttatctagggatggctgaaggtcctcctggggtggggagaaggtggaagaaaccactgactaaagtggtcctggccccattctcccagcatgtaggttttctggctggactttacaagtaaaaaccacagtgaggagctcacttctacctgaggtaacacagtgcatggcccccacctgcttcccttcatatcactatcttgcaaaactggctcagagagagcctcctggccctgcgtagcctgggaagataccacccaccatcatttgttacctccccacagtgggaaggtgaagggcttaggagacctgcttcttggcaccatcacactgtactgtgttgtcaccctatctggacctcagtgtttcctctgcttctataaaacggggtgaataacctttgcctcctaaataccaaggatacagcatcaaggagaaaggactctgacctcacaggaggtgggaccaaggagaggggcaactcacaaaagcctgaggaagaacattctttggtggcacctccctgatgagcagagaggagccgctctgcaagttaagtaattgatggagcacacgctaaaaatacaaactaggttagcactcagggtggtttattgctccaagagggagttaattcaggcactcaaatctccatggaacagggactgtgagcccagagcagcagactcctgagccaggaggcctcatgcaacccagctgagaagtgctgtttacttaaaggctgagcaagacggaaccagagaaaatgggctggggaagcatagggggtggcagagaagggagtgcccaggccttaggagcatgagggaaagaaaggaggcaacatgcaaattagtaacaggaagtgggacaggcgacaggagctggaagggctactccctcctagattgggctgcaaagaccccagcctcccagctttctggagccccttgctattccaagtaagctccagagaccagcggcatctgcatcaccagggctctcatcagaaaaacagaatctcagaccccaccctagacctcccgaatatacattgccacaagatcctcagatttcctgtgcacactaaagtttgagaagcacaagattaggagtcaaaatccctgagttcctggtccagctattgctatcaaattgctgtgtggttttgcaggacttgcttgacctctctgggtgctagaatttcttcctctgggctacaggatgagtgaggcttgtttctttctcctgggttctgagaggctcaagtcagacccttcatctgcaggcctcggaagcatgggagggcctttacagaaaaacgtttccattttctaccaggctgcccccttccgctttcttggagtcattagtacacagagaggtagatggggagatgatccttgaaggacacactgcagtcaggaagaagacttcttaatgtcattttaagccttgatatctctccattaaaaaaaaaaaattataaagcagcctcttgctaatggggaagcagcgggtctgagtcatgctaagtaagccagagcatttcatctggaaatccctggtctggtgttacccattgcctttgggacattcaatatcactactgcacttgagaaatgtggcttctggggctcagagaggttaagtgagtgggtcagagtcacacagccagtgagaaacagggccaggacgggaagccaggctcccggccctctaagagaaactcttttaagtacctcaaggtgcccacgtccttgacagctgacccagactggtgtgaggacaggaagggaaaagacattctgactattgcctgagttggacagagttaagaggataaatctgggaggatatgatatcacaagggttcagatagaaagtttctaaattattgcttaacttgtttcatcaaatgaattgcttccctccattagcccagggctgaagtggccaattacctgccttctgcacaggacgacggccgtgtataaatcaacttgggtaggtaacaaaggaatagccaaaattctaaaacaaaaatagatgagagacttaagcacaccccaaaataaaacacacacacactcggtaactcaagtattaagttctgagacggccaggcctgagtccctctcggcctccatccagagaccaaacatacagtctctgatgatgctgagcgtggcaatgaggcctttgcataggccacgatccctgcagcaaactgcgttgccttccctgggctttgggaaggacacttaaggctggagattcaactaagtgcaaagctggtacctgcagacccaggggcaccagtcagtctacagctatggagggtgttttaatgcaaatggtaaggcaactttgctggtccctccttctggctccaggatggcacctcctggggctgctgggcttttcccaggtcttaaaaggaattctggtattacagaaatactcagagttttggagttagaacagcctgagtttgattctggatgctgccactcactagctgtatctgccttgggtgagccatttaaacatactgaaccacagctttctcatctgcaaaatggggataataacaatgccagtgtcagagggctatcaagaggattgaataaggttaacatatacaaagcaccctatcggcacctggcaaacagcaggcatttaatgagtgtgggctccctccaacatagactagaaaaactggtcgaggggtagcctctccctaggaatattctcttcctttatacattacattaagagggtgaaccagtccaagccagattcccaattccatccttcagcccaaggctgctccattgcacagcttcaggaggcactgcccatatggtggtctagatgtgtgacgcttcccggggctgggcagtccacaacctgcctcagcctatggagacacccatgggatgctaagagggaaagaagagatccaaatccacccttggcagaaaatgggaccatcccaagaaagtgttcctggcaggagctcagtgggcaggaagtaggatgcccagcaagggcatacccttggcgggagcatcaggaactaaggcaaaaatagaccatgaggcccagggctgcatccacctcttcctggcccagacctctctgcccctctgaagcctggctgccctcactcctcgatcctcagtgcctagcatggactctccacacccactctccctcacttcgcctggtctccctaactagagagcaagctccctgtgggcaggggagtaactgatatcactgtggtcctcttgagccaaacacactgtgctaagaaagcccaggcctgcatcatctgctggctagctgcttcttcatctccaaagcccaattgacacagccacccatgtatctcagaggatggttagagagcccaaacgatgctcactcagtctttcaacaaacatgcattgagaacctactgcatgagctctggagtgcaatagtgaaataggcagaaaggattcctgtcctcaaagagcttattctctagtgagagacaaaggccaatcaagtacacaaacaaatactacatattacatatatgttaaattgtaatcaactacaagaaatgagttcactgcattatataatcaaccattgaaggcttcaatagtcacagaaagactgatgcaagagacaggctgaatgtagctctagtgagagagtaaggagccagaaaggtaaggaggggagaatatgagcaaacaagcctcctgtgcaggacatttccgtctgctgtgaccacccttcacagaactgagggcttgcctgttctgtcacgtgggatgctgatgtccatgagggaggcaggttatcacctttgatttgaaagccctagaggcagtgaagttgcaatcagatagacaggacctgaaagaaagaaaaaagggagggaggggggaaaggggaggagaggaaaaggaagaggagaaggaaaaaaagaaaaagtagagaaaagaaaaaagaaagccagacccctgtgctaggaaaaatctagctagaggaacgcagagcctagcctgtgatcttaaggtgacttctaggccagactgtgaagggcaccatgtcataaagccattgccacctccatttgatgtgcaccatcacctctcctggctcttggccttatagattcaccagtttttaaaaaaactcttacattgcagctgcttctcagaggctgagactcagtgactgtgtcagttttcatcttaattcatgtctgtactgccacactgttggcaggacatgtttcacaccaaataactacactttaatcaagctctctgttggttgcattttttgatgatggaaagtccgtctccgaagcagttgtcttcactaatgttgactgagcagtgctcagcagatgtaatgctgagcgaataggggatcccaagggactccagggtgccagtgcgatgatccaacagggttccagacatggcaatttagttggacttcatcctcagtcatagaatccagtggcagaactctatgtcacagcatcacagttgtgtggacacacagagctgccagagactataaaggccatagccttttccaccagcgcctgcatttgcccctagggaaagccaactcgaggtcaaggttagttcccaagtttccagacttgagagaggacagtggtcagagagtccagaagtttctgaaaggctgctccaaaagggcagggaggcacagcagggccacttggccactcgccgagttctacattcacagggaccacgaattttgaccttgaagctattcctgattaggttatgtacacattcctggagatgtattcatggaaggaaaaaatatggcattgatcatctgatttaaacttttatcctgttaccagatctcattctggtagtacactaggaattaatatgaagtttgcaaattaagtattatcctttgaatagtacaatcatattgtttccttgtttttatttttatttttatttatttttaaattttttgacacagagtctcactctgtcgcccaggctggagtgcagtggtgcgatcttggcttattgcagactccgcctcccgggttccagtgattcttgtgcctcagcctcccaagtagctgggactacagatgtgcacaaccatgcctggctaatttttgtatttttggtagagacagggtttcaccatgtgggccgggctggtctcgaactgtcagaactgtcaggggattctgtcagaaccaggggattctggagtcagaatgcctgccatcttctcctatagctctgtgtctacacacaagttacttagcccctctgtgcctattaagggctgatttatgttccccaccaaaaattcacattgaagtcctaatgcccagtacctcagaatgggatgtattcagagacagggtattcaaagatgtgataaaattaaaatgaggtcattagggtgggtcctaatgcaatatgactggtgtccttagaagaagaggaaattaggacacagacatatacaggagggagatgatacatacacagggagaagaaggcagtcttccacaaggcaatgagagagtcctggaaccgatccttccttcacaacccagagaaggaaccagccctgccaacaccttgatctcagacttctggcctctagaactgtaagaaaattaatttctgttgtgtaagccacctggcctgtagtactttgtcacagcaggcctagcaaactaatacagtgcctccctttcctcatcaagaaaatagaaatgataatagtcccttcctcacagagatgtgttgagtacccagttcccagcactcagtaggtgtccagcaaatgtttcttgcactacttgtgattagtacagagtcttaacccaacctggtctctgcatgcttcatcttactcttctgtgtgagaaaagaggcttataatgaaagcagagaacagtaaattctgcagacaagtcacacacttcacaatccccaccaccctccccgaccacttcgccccaagcaccttaaggttgaatggtttgagtcccaaatctgcacttgcataaggtttcttttgctctagccatgtactttgctgactgttgtaggacccgcctgcccatcctgtgttctctccacccaataccttcaaaggccacaataggaaccccgctactccttggtttatcaatattagacaacttaggatgcagttagagatccacacgccatccaagtccccacattacagaaattagaagcctctccttccagtttattggagaaggaggatttctggtcaagacgtccaccttcaagatgaggtgaagagcagacaccactctggacagtttgcctggccacctaaggaaaacacagcgtttagagggcagcgccagaactgtgtctcctcaagaaatttgtcttgagaagggtccctgaatataacggttgccagaggggactccttggggcctagagcaagcttactgggggtcctggaagagttctcagaggtgtgtgaactcactggcagctgactgagaaactgggagtggcacaaagacctttagaaaccaataaggacttcagaggtatcacccacaagcccagaagtgtggccaaactgaataccccagctctctgctgcctcagcaaggagccagggattcagtgatggtgtcttcttccaaacctgtatggcatggtaattaaaatcaaggtcatttagaacccagaaaccaaagccattctgactctagagggaattttaatttgttaatggatcttccggctgatggctgggggaaaagatagcaattcacaatgggtttgaggccaaaaatggcaccacagtggccgggaagccgctgatagctcctcggtcagtcttcaactgcagcaaggaacaggctgggctacccagggatacagatttttttttttaactttttaatcagctaatagcagatgaagacctaacaatgctgccaagattctgctccttctgtcagcagtggtgagaaggaggccagggtcggatgcgtccggctgcctttgctctctgaggttcttttggagggatgtaggaatttggggctgaggaggaaaccccagggccatcttctccactggtcaccaactgcaaggatccaggaaagggaaacaggtggaattctcagttccctatgccaatcctgggggagggcctgagacatgtactgtattaatttaccccacaaatgattatgggctgcttaaacggtgccacagatgtaatggagactcagcaaactgaggaggtgaggcccggaaacgtgtcactaaagctgcttactgtgtgccgcaaagggaagactccgggtggcctcagacagagggagggtagggcagcagaagagcttcatccagaaatgtaaaccaaaggcccggcaccctaccttgaacacccagtgctgccggaagatcctgtccccacatgagggctctgggcaggggatctcctcctaaccagcgccagcgaccacaaagggtgctcttcagtggagaagaaaaagaagaatctaattcctgacttttatttttagctgcaagtcagacagaagagcagaaagaaggcacttgaccataatcctgatcatactgaacgagtaatttaatcatttttaaagcctgtgtgcaggctccgccatcttactggggtctaacttgggaaactctcacctcatttcaagcaaccagggtttctctacaagagccatcaaaaactacttctttagaagcacaatttctaggcatttgttttgtccaaaaacttggattctcttactttgttccttgagctaaatcaagcacaactatgccagctgaggcagtgaggagaaaaccggggtggggaatgaagcaggcaagagggcctcctgccctcagagaggcagcccggctcatccaatggatagacgcacaccatacacacaccacacaacacacatgtaacacaacacacactacacactgcacaccacatacataacacaactcatactacacacacaacacatatacaacacacaatacacaccagacatgttacataactcacactacacaccacacacataacaactcacactacacacacaccacacacaacacacaatacacaccacacatgcaacacacactacacaacacacattacacacataacacaactcacactacacacacaacgcacatacaacacacaatacacaccacacatgtaacacaacacacactacacagtgcacaccacacacaactcacactacacacacaacacaacacatgtaacacaacacacactacttaccacacacaccacataacacacatcacacatacacacaccaagcaccacacacaatgcaactcacactacacacacaccatgcaccacacacgtaacacaatacatgctacacacacacttcacaccatacaccacacaccatacacatacacacagcacacactacacacacaccatacactgcacacactccataccaaataccacaggtcacacacacacaccacacacactatacatatacatacataatacacacccaacacatatagacacatcacacactacacacacacaccacacacactatacacacatacacattatatacacatatcacacatacacacataacacacatacacgcattgtccacacaccatccacgtacataccacacatatacacacacccaacaaatatacacgcagcacacacatactatacacacattatacacaacgcatgtacacactatacacacatcacacatatatacacacacataaacatacaagtggtatacacacactatacacacaccatatatatatacacaccacatacaccatacatacaccacacactacacatcacacacacataatgccacatacacacaccacacacacatacaccacacaccacacacatgacacatattcacatacatgtaccacatacacacatgcaccatacacataccacacacacacaccacataaatacccacacaccacgcattctgcacacactacataccacacatatcacacatatattatatattcactgcccacatacacaccacacaaatacaccacacacacacacactacacacacactatacatacatcacatagacacagacacatacacatagcacacctaggcacactatgcacatgtcacacacacatcacacacacacagagagcgtacatactaaacacacatcacatatacacatacacacaccacacacacatactacacacacactatacaaacatcacagacacagacacatacacatagcacacctaggcacactatgcacgtcacacacacatcacacacacacagagagcatacatactaaacacacatcacacatacacatacacacaccacacacacatactgtttatttccttgctttaataaaaaaataaaaagagagagaactttaaaaggaagcagaggaaaataggcatttggaaaattagccccatcctaccatgatagctcctataaaacatcttctagagtctgattttcccacatctaaaaattatttctttttattctgttgttgtttggcactacaatataaatatctgtgcgtgcagaagcagcttttagtctttcatctgtgacatctgtggagagcgctggagcttgtgtttattcataggcatcagtccgttccacccttcaaacaacaaaggaggcaggtggaacccagagatcagaggagtgaagacattagctcaagggctcaggatgggctccaggtgcacttactctatgctgtctgacattcatggtgggctcgtactaggattgggcagggtgagtttggcaaaccaaaacccaaatgtgcacttcccagcggggccacccaccagggtgctgtaccctaaccctccacggctgtggcctgccctgggtcacctcatggcctggtgctgcccttcacacgaggaaaacccttctgtcagttcctagtctccatctttctcctccctgattccaaagtgcaggtgcctgctgactgagttctttttagatgaagtctgttttcaccataggccctcaaccaaaggccagttgacttcaactggccaactttcatctcaacccagaattacagctatccccaggaggcaggcattggaggagttgctggaccgcagaactgaacactcacatcctctgagaaacggagcagtgaaggctcttgcaattatctcctgaggggggctgatgaactgggggccccagcctggagcagtggaggccaagaagagctttagccctgtcttcaagggcctgaagagagtggcccagtggtcagatgtattctgtccatccccagggggagaccagaaccaccagacagaagatttagagagaaatctctctcttgcttttcagtagagcctgactttcacaagataggaggggcctccgtggatggaaacaggctccctggcacaggaggcatttaagaagaggtggatggtctctcagtgggacactggagcagggggacagacatcgggggaagggtgggccagtgcgacctttccaattgcctcccaccttgagaatccctgactcgacagagtgaatacacagccatctgagacctcctggtcacctgcctgcagggctctcttctgggcctaaaaataagattcccagagtcctgatccaaattagatccttaataacgtgtcaccatggctataaataagtctctttgagggccagttaatataattattttaatcagctacactccctagaaggactgccagctagctccccgctcagcctcgctgcgttctgaacaggtgcgctcctcctccgcctcacccagggccggtccttagagcagtcacaatgatgaagggtgggtgggcagtctctctgcttccctctctctaatgtccctgagacactccttccattctggggcctacattctcccttgatcattcaccaagacttccaacaggaagacaggggtgaaaacgcaaagtctacaagagccagacacacagcaaagacatgtaaatcacacacggcatgatgtgagagagagtgttacggactgaattggttccctgcaaatccacatgttcatatcctaatccccaggacctcagaatgtggctgtacttggtgacagggtctttgaacaggtgattatggttaaatgaggtcattagggtgggccttcatccaacaggactgatgtctttataagaacaggagattaggacatggacagaaaaaagaccatgtgaagatacagggaaaacaaggcggccatctacaagagccaaggagagaggcctcggaggaaaccaatcctgctggcaccttgacctcagacttacagcctctagcagggtgagaaggtaactgtcggttgtgtgagccacccaggcgatggtcctttgttacagcacctcaggaaactcacatggggcgcggtagggtgtgccctgtctggaggttccacattcttttttttttctctctctcccaaagactggacagccaaacaacacagagccctggacttctctgtcattgtatatgactccctgagagaatgtaaggaaagaaaagcaatagggtgtcagagaaaggacattggcctggccgggagagctggtgggtttagccaggctacctgagcaagctgctcagtcttgggaactattcaattatgttggcccccatcctatcatcagttaactgaaacacctggcccacaatgacctttaaagagccttccaggactaacaattttgcccctgggtagcaaggggcagcctcagatcatgagcctagaagggagaagccctggaggacagagtgggacaactgcagaaggagcacacagaggtgtgggtgatgtcaggaggctgcttgactctttcctggagctaggagctttcgttcctgtcccagctgctctatttgctaagtgcctcaacttgtccccctcccgggcatctgtaaatgagataataggagtgcacgtgttgtgtaccagtgaaagtctacactatgccaagcatgctcaccattacgaaagaggacaaggacaggtgggtgcccagtggcttctcaagactgacatctacatttatcagattccccaaggggcaactccctgggcaaggcaaggtgggtcttcagagttggggccggagtgcctgtcttctccccaccacaaacctaggtgccacattactatacagtcctaaagatgctttaggattgtggtttcgtgctgaaggaggcaggggagaaatcgtaacttgcatctcccaaaggctagaagtgaaattaagatccttacacacgcttagtggtctgcattttacatagagctttcaccaatacaatctcccaggtattattattcccattttacagatgaagaaaccaaggcaaggggagattaatgatgaaaataaggcagtgtaaaaaaaagcacaaggcttgggttcttactttgacctttaacaaagtcacttaatatcttgttatcacatggcctgcaaacaaagtcctgtagccagtacaagcagggtcaaaacatgacctgaggacttccacccagaacacgccatatgcacatttcacagattcaaataatctcagaactggaagggcccttggcaatcacagatctgattcctttggatttatgccaaggaaactgaggtctaaagatctccttgctcagggtctcacagtgaggctctggctggactaaaaccagagtccagggttctttttcatagaccatcctgccctgtcaatttgacttcaaaatcttcctcttcaacacaaaccacaaccacaaagagaagggtcttctgggttatctgtattgggttgcagaaagaagttccacccgtacccccaaacctggatacttcctccaggccgcacggtgctggcctcctccagcgactttgagcaggagagcaaatgagtcaagctcctctcacaggatgaggctgctgggagcagctcagaggactggaattagaaattctaattattagaactctcggaatgcaccaaaggacaatttataattagcacatgtcaaaaggccatccgcaaaggggacacattataaatcagaaaacaaagatggccccagaaagggactggggagctgagctgtttggcctcccacccctcctgatggccctaaatccaatccacctcccactcctgtgagccctcctccctcctatgccagcctctctcctgctgctctgccctttgcaagcccagcattggtgcttcccgctccctaagccctcttccctctgctgctcggtcagggccactgtccgaaggccttagcacagggatccctctcttcagggtccatgcagctctaaccccaggtcctgagcgggtcagaggcttttggctcctgctgtcacaggctgcaaataaggatttaatgactagcctttttatgaggaagaaaatgtctccagtggactgataatgtcatcgtctgctgctcaggtgcatgtgcccaggtaagcctcacagccagaaccctgctcttatgatgaaagctcagggcacaatcccagtgcagacttggaaaggccagcatgcaaaagaggtcggggcacctccttgtttcttccatgaatgaatgaatgaatggattttctactgacttatatgccataaatattttcttgagtacttcctatgtgttagtcacagcacttgagattggagaggaaaagcagtcaaaaacacagaaataaataagacacgaccctaccctcccagaattcatagtagcacatacttgacaggtgaaaacatttttagaaaaacaaaaacgaaaaccagcaagagaactggcatctgaaggcaggacacctggattccaggaaaagctcttagctgcatgacttgcctcctgccggtcatttgtcttccttgggcctccatcatctgtgccatggagataataccaacttcgtggatcccacaggggttgccatggaaaacatgataaaacacaggaacagaccctctgagaaatgtctgcagtgtaactccttatcataacacgaaacactgaagattctgttggctgataggaataagaattctattttcccacacttgccagtctgactcaagatggcacctagttccttggacaaagatcccaagggtagagaaaggcaatttatcaggccaccatatgtctgtgcttaccaaggaaccttctagatggtgacattttctcatatgctgtggctcacaggggaaagactgcctctatgtctagggatgacaaggttttattccaggagcaaatgaaccccatctgtgtggtagtggctgcctggagcactgtgttaaaaaagatcctgaagttgcatcttggcttggctagaaagaacatcctgatagattatggatgtctgttatgaatatggagttggggagtggcactttgttacttgtgacctaggaagataacatgcccactcaaccacactccttgttgcacacctttctttagagctgtgtcctctggccattcaaaggtgagctgagtattggtcaatgccctgaacacgattccttctgtgtgaattgttaatattaagttcttagagccagcaaagcctaagacatatgcccagcaagaaactgctatttttaggaaattagctggtccttcagacccggttaaatgtgctaggtggtctcagtcatgttctttataaactgagaagaatgcctcacaaatttgggtgtcattagggtctgtggatcccgggcactgccacacaaaatcacccggttcaaataccctgcaggtacatgataccctctgccgttaattctatgccattttgttgaagtctattccacttccttcctttaccacttctcaggacaatgcattctctgagtttattatgagctttatgctctatgaattcttgccatttttctaatatttaccctgcttgcgttttaaaggggacctctctcttagcatgtcaggatgtggcaaagagtctgtactggcttagttgctctgctcacacttttataaaagtctattatgtctgtgttaattcccaacagagctgagctgcagtcaacccctgaactacttattaaaaagaagcactgagcagatgaacgctctgctcatgactgagaggggaagagaacagactgtgtccaagtccatcaacacatcatctgtgcaccaggaatgctccaaacacaaacagccctagtgagtcacaaggatagatgaatgctacggtgattcttacatttgcagtcaggaccacagagtgctggagacaagaggcagcttagaaaccatctagtgactaaagatgcagaaattcaggcccagaacaattaaccggcccacagtgttactccaagccaggtatacttactataaaaaagagtatcacaaaactctacatgtgaggtatttcatttatgtctctttttgctatttcagatggtttcctctcagaactaaaagcacattgtattgcacattgtagatactcaaagtctgttaaataaataaaccaatgaggtaatgtacataaccctgcagaaggatttcagtacaatgctatttataatagcaaaaaagaggaaaaagtaaagagcaaatataaggaaaaggagtgagcatccatataagatatagtcatttaaaatatgtttatagagtcccagtgtcacttggaaatgctgataacgtaatgttaagaagaaaagcagaacactaaatcgcacatattctaggatctcggcattataaagaaaaatgcacagtaatatatttgggggaaaataaaacgaatcatgaacagtagtagatgtttctgttgtgattatgggaggttttatttctgcttctttgcactctgctgttttttgcagataatttacaatgtgcccataggattttcataagcaatgcgagggtattaagaaatagaaaagaatatccacagatattattcagccttgctgggatttggaaagagacagagatcatttctctcttttcacataaagaagctgatgaaacaaagagacagagacactagtgatgaaggcaggcattagctctctggtgtggagggccatccaatgccaggcaaacaacagatgcgggataaaatccactcaaaccacagtgggagggggcaggaggtgtccagtcttcctcttcacaaaggttccatccttaccttatccaaaagatgagcaatacaaggctaggctcagcctttaccagcagagcctccccaaagactctctggcccctgcagccaatgacaataaattaactatcacagtgaggtttttccccttcgtcaggcaatgtgctatacacattgtctcattaaatcctccccatgtctctgaggcaggtcttactgtgcccatctgagggatatagagaccaggactcacacaggtaaacccaggtggccaaggtgtcacagtttgtaaccggaccccagaagcctaagccctcgcccctgtgccccggctggtcattcgttcctccagatctttgcagcactaagaagatgctgcctggtgacatttcctgaattgtttcccacgggtcttgtctttcaggctaggacaagttgtttaacctttcacgtgcgtctgtctctcttgcttccctcaattggactgttagctcctgagggggatgagggggtcctgctttataattccttgtgtgtcccacggagccaagcctggtgatgtcttcagtacttgacacttcagatctcagaaaatacctgctcatcgattattggattgaataggttaaggaggagaaccgtctcatgggcagacctggcctgcagccaagacagaagctggatgcgcctccctccggactcttgaccccaccaaatacgacgcccatatatgtcaactgtggcattggtgtttgtcccccacacccctaaaccacaagccaataaattgcagggcactcagacatcaggatgtgtccttcacttgccaccagacctgagctggctacaggccaatgacagcatagggctggccctgcccgcctcccatctggcagcaaggatccagttccagattgtgacctgtggttgagtctggcacagtgacccagggctccagcaggcaaatcccagtcataaaaccctggtctgaaccagccacgtgatggaccccagttatctcttcctaaattgcagcagagctgatcttcttccagctgagccaagggccatcagacagggacacgtttacttttactatcctattaaagcatcccagaaaaaaagaaacagtccccatatcctagagcaagaaataagcaaatcattatctacaatgatatcctttaagtctaagcttgcccagaaggtgctgcacatttggagaccaggctatggctcccctctctgaattcttttgaaaccgcagggactgttacaggcgcctccaagactctggagccacagcttgcctagcgcagcttccccctcccggcaaagccctccctgacaaccctacccacagtaatctcaactttcatgaaccttttctctccccatagggtgaacacataaagacacacacgtgcagccgggcacggtggctcacacctgtaatcccagcactttgggaggcggaggtgggcagatcacctgaggtcaggagttcgagaccagcctggccaacatggtgaaatcctgtctctactaaaaatacaaaaaaaaaaaaaaaatagccggaggtagtggcgggcgcctgtaatcccagctacttgggaggctaaggcaggagaatctcgaacctggaagggggaggttccagtgagctgagatcatgccactgcactccagcctgggcaacagagtgagactccatctcaaaaaaaaaaaaaagatacacatgtgtatgcacatacacacgcgtgcacacacacacatacacacagcgtgtacatgttatttctccaatgaaagcatatttcccttaagggataggaccaatcacttatctttccagagtctaactgaaaaatggacccaacatccttgaattaataaataaatgaacaaataaatttgttgatggactggtcagttgataatgtcaaggaactccctgcaacagcctacacaggttcaccctcctccaaaatcatacctttccaagtccaaggaaatgctcaattcaatcatgctgttttagaaataaagtaatgaatgatattaacaattgtttagaaactaacaggtgcctggccaggcacgatggctcacgcctataatcccagcactttgggaggccgagacgggcggatcacaaggtcaggagatcgagaccatcctggtgaacacagtgaaagcccatctctactaaaaatatagaaaaattagctgggcatggtggcaggcccctgtagtcccagctacttgggaggctgagacaggagaatggcgtgaaccctggaggcagagcttgcagtgagccgagatcgcaccactgcactgtagcctgggcaacagagagagactctgtctcaaaaaaaaaaaaaaaaagaaagaaactaacaggtgccaggtactaggcttttgatataaatctcatacgttaatcttgtaagtgaggtagtattatcattattatccccattttacaggtaagaagaataaagaccagagggctatccacaactgaagtatagacagtgggtgaggaaacatgaaccaaatggttcttccagactcagggccagatccctggcacaaagtgcctaccctgcattgccttcagctaacgtgccaagcagacagttcccatccttcaattttatttaatcaaagcaaagaattcataagaatctgcccatgttcattattcaggcagattaaatatttgatagccctgtagtttaattttttatggctcagagattggagtgaagtgctccctgggaagccacactgtccctgggacagggcagcagctggccaaggaggccagaggccgaggctccacagggctctgctcagcacccacgtgcatctgtcctgactccagtaagctgctcatgctgggtcccagggccaaaggttacagacactttgtaagtttgcaagagaatctacaaaaaggaaagaagggctgtggggacaggaggcttagggcatcacaaaatcagaaaggaacccagatgaaccaaaacatccaggtcccaggaaggggaggcagcctcctccttctgtctctgaccacgcagcagaaacaaagcttttggacaaatgcatgagacggcataagggcaggatcaacttgtccatctctctgccaactaaagcaccacagggccatttgggaccttttgcctgccccttccagccacatgtaaccttcacagtcactacatattcctcccagttcactgtctccctgcagaagcttgaaagtccacagagaacaagaagagctgggagccaagagtccttcacagcctcaatctgttctcctctggcctaaagaagctctctttcctagtccttttcttatcttcaaaatgaaattccagcagtttttgtctcagctaccccaaaatgcccaaatgtcatgcagcatgatttcaatccctgaactgctccaacccaccccgatgcccccaagtctctctcttgctctccttccctcctttcctccttccctttctccctccttcccttcttctctcccccatccttcctctcttctctctctctctctcacatacacacacacacacacacacacacacacacacacacacacacacacacaccccttgttcttctgtgcctaccatagaacaagacctaatatctaagaatttcactggtacccagtcaacatccaaccaattaatttgttcaagggtttagaggggccaggagaggagactttttcactccagcagcccacggagatttctgttttaatttctttttaattggcagcgccactaacagcatatcagaaatctctctgctccgacccttctcctctcctctgttctcttcaacttttacaagggaaggacatccggcagttttctggaaaaatagagacatgtcacagcagagcccagctcctttttcctgccatccctattcatcaccagcctcctgaggagccggggtggtgacacaggctctcacttcatccatgtggggctcatcggggcaggtgacgaggagaaaggcatgcgccactccccccagagatggggcctgtcgcctcctgggaaaactggggtggagggctctcttccccgatcacctggctctatcttgctctacagacacctcactgggccctcagtactctcatgagaagagagcagacttccagccacccctgcttgccactccaggcctctctgctgatgggtgtatggccacgggacactggaaataacaggagtgtgtggtgagggagaactgtttgcccattttccacattcaagaacctggtgaaaagatgagcaaggattatctccacactggaaccattcatgctgcaaaaacagcactgagacattgaaggggaggaggcaatttatttgctgtcttgacactgtcgcccaagcaattctcatcgtgacaaaagaacactctggacaatcactgcccctcctctttcaggaaaccacactgagttttcatgacttgcaggtgacattttaataaggaatcaacatggaaccacaggggaagtaagctgaggccaggatctaggaggaccagggtgggaggggccaaaaatggcactcaggaaacaaagtcacctacggtgcaaaggctctttgtgcctgcaagtctggcaccgtgggatttctggcttttttctcctctctcatttactatttgggcagaggggaagtattttccagaaaggacaaagtagaagcagcctcagtaaagagctctctagaaacttctcctattcagttggtgttttacaaagtgcaaagcactgcaggcacctccattcacttatcccgttacgtgggtgtcgttatctacatcttataggcaaggaaaatgatgtgcccaaggtcacagagctactgaaagaaggaaggagaaatcagacatttctgtgccacctccttatagaagttgccgtcccccatcataatccaattaatggtaaaaatcacaactgaggctagatatgcagtaactccttgtgctctgcacagtgctaagcactttacatcagttgtctcctattttaatcctcatactaatgccaggagagaggtgttatcactctcatttgtcagatggggaaatcaaggctctgggccatcagtcacttgtcccaggccacagaagcagcaggagcagaaccaggattcaaactgtgtgcccctgcctgtgtatctccatggttctcaatcttgcctatcatcagcatcacctggacaaatggtccaaacaagacatgctgggccccacccaaagagtcgctaagtcagtggggctgaaagcaagcctaagaatctgcatcgccaacaacttcccaagtgaggctcttactgctgatatgaaaactccactttgagaacctctgctctgtctagcctgcctcttgtcacccacaagctaatgtgagcatcctgttagacaagtaatggaacaagatgtgcaaaatgtggctgcaggaagttcacttcctgatgcacaaaatcgctccaagaaatcacacaccatccagaaacacttaagcatcatctgcattaaacatcaactaagggatgttctaagccaatttactctaagactcactctctccttcttctgaacctcctctgctgaaagtgaccatcttccagccagcccacctcatgatcattaaaatacagctgtggagacatagggagcacttctgaatgagcaacccccatcagtgtccactcccacgtgtgtatttgtatgcccatcatgcaccatatggtgctcatattacatacgcaataaagtgcacacagatgtaatcattttaaagagtgataaacgtaaatagaaatagatgtcttaacattttcttcccctattccaaaggatagttttgtgcatcccactttggaggctgctggtctagaattcactgttcccgtttctaatttctgatcattagaatttggcaaccaccccctgcccctgcaggctgaccgagcgtgtctgaagagttgctgtgctctgtggttcgaggaaaagccgtttcctttctgttagcaagcccctagagaacacaggctgaccctccaagacttgcccagcacaagctctgtaagtaaggatggctcagccaaagcttcttgactgtgggggtcttttctccaaaagagaataagaagcatctcagagcccatagagaagacagtggctgtctctaaaagcttttgacctaacaagcaagagcaggagactgagccctcacttctaaagcagcaggaggagagggaactggatcagggtcagagagcaggccttgggatcagcctccaccaataaccatgggtgagactgggaccacactgtgtcccccaaggaccaatgtccttgcttgtcaaatgagatatagggtgaccaaccagtattgtggggcctcccagaatgccagagtttagtgccaaaactgaaacacactagaatgtttggtcaccctagctgtggaccaggtaccgggctctgggcaactataagtgtttatcagccctaccctgacctctgctgtaaggtatcctaggagagcctgagggagctggaggccattccctgctcactagggtgttgcaatcctaacaagatagagataatgataagccatgccaagtcaaatgtcaataccaggtcaaaacagaagctggaaagaggacataatgtaggctgccgtggccaggacagaccttcaggaggagggcagggtgcaggaggaggcagattaagcacacactgaagtattctttcctcaacctcacctcatctcctccctccccttccccaccaccaagtagagcaggaccgcagagaatgaacttaggctctggagtcttcctgtttgattccaaatctggtgctacacttttccttttggagtgatctcgggaccattactcaaactgcatagctgaggtattgttttctttaaaatggagccaattataccccactttccagggttgttctaaagattcaatgaagtaatgcacacagaacactttgaaattgtggctgagagcacaagctctataaatattggctgttcttaacctctcttgacccttttcaatctgttcgtgaatctaaggtattttcaaagaacagtgagctctccatgagaatgagctatcctgaatatttctgttattaatgatgggtacagccggcttagttctgcttctatctgtcactcctgaagccagggaggatgagagggtgtgtggagagaaagtcacagggaagccagccctggccccgggcaaagcccaagggtttctcctggccctgtgcataataagaagcagcttcctctgtctccatttccagctcctagccccaagcaggcaagtcatggaggggtttcccttcctccctagtcccccaggttctgaagaaagaaaggttcagaggccttctccctctgcagaaagggtatgtcacctcaggccatgacaagtccccagctaagcatccgctcaggaccacttaaagctcttgaaaatgagctgtcttagctcatggcaggtttcaagaatccctgcaggatgaaataccagcagtgttccccataaactcagtcagcgatgttgatggtaggaaccaggaaaggtaccgtcctgcctaactttctctccatccagctcagccctagaactcaacacatatagtagaatctagatgagtaaacccccacacagacttggccctgaaattccaccattaggcattcacttctttgatatgaacttcttttctgtaggtaatacatttttttttggttgcctggtatgtcaactggaacacacttaaatgaagaagaccaagattcacctcagcctctccccttagaaatctcgcaagtcaactggggaaaacaagccacacagaagtgtaatacacaaaaagaagtgtatacttcttcaaaaagtatatacttttggtgcaatacacagaaagagagagaagtgcaatacaaaagagagagagagacactatcacacttgccctcaaagggatacccccaacaacactgcacattccccttaccacacccccattgcaccttcaacacaatatcccaataaaagtaattagattaaatggtcattgtttgtcatgggcaattctctcactgtactgtgagttccttgaggcaatttttctctttttatccccaaaatttcgtgcatgggacagagtaagtagtcaatgaagatttttaaaaattgttaattaaggaatattttaataaaagtaaaatggaaatgcaagacattttgagaagggcaccagcttaagccagtggtcctcagagatggccctggacctgcaacatcacctggggatgtgtaagaaatgcaaagttgtccctaccccagaactacaaagtcaggagtccccaggttgggctggtactgtgcgttttaacaaggccatccaggtgatgctaatgcccactcaagtttgagaaccaatgacttcattcagcctttatcatcagacaccttctgcaatatgggttaactgtcctcaactctgtgaatataggcatatattcattcaatatatgcctattaataagcacccatgcagcaaaggccaggtggagccagccctggtcattaggtggcccaacgatgtcgacaagatggcagacaacatggtgagtccctaagcagttactcccaaagaccctcaaaggctgttctgagccaacaggaagaaaggccaccaagttgtggctgtggccagctgactgccctttaggaggagctgtgaggatgagatttcctagcaggaagctgctctggggaagggggatggcatcctgacacctgggagcaacagcctggaccatggattgggaggcggagggaatggggcagggcagtgggccacccaccttgtgccattggctgccggaccctgagcactgactggtttggagcctggtgtctgggctggtaaggaagcaaaggtgaaaggggtgtgggataaggcaaggtgagggagcagctgagccagcatccccttctgatctgttgataggctccacatctaggcctcttctaaacaaaaaggctgagctgccggctcagcagcagctctgtgggtgcacagccctgcccatcatttccccctgtattaggaacaaccgcccaactctggcccctggggcaggcccagagcccaggggtgacgaggagacagcacctcagccctggaaggtaccatgtccaagtgctcctcagccagggcagccatgttctctggaaaccagtagaagtgcagaggacactctgttccccaatcaggggcaaagttgccacaacttctccagacttggttttccagggccataggtcacctgctgacacttcatttaaaccattctcctgttataaaaagggacagtttggccaacctctcaacttacaggccctttagcccagtgtggctagccggctcttcccaggcacccacaggccaggagctaggaatgcctgctccactcaaggcccacctgccccttcccatcttccccctctaggcagagggggtcataagggttgcaggagcctcagacaggggtagatgaccccagggcctacctgtgatctcagggcgatgggtagagctcacagggctgacagacaaaagatagggtgccagttacatttgaaattcagaataaacaagaaataattttttagcataagtatgtctcaaatattgcatagggcatacttaaactaaaaactaaaaaccaaaaacctatcttgcttatctgaaattcaaatgtaactggacaaccttattttctttttatttatttattttttattatttatttattttttttgagatggagtctcactcttgtcgcccaggctggagtggagtggcacgatcttggctgactgcaacctctgcctcccaggttcaagcaattctcctgccttagtctccctggtagctggaattacaggcacccgctaccatacccggctaattttgtttgtatttttagtagagacagggtttcaccacattgaccaggttgacctcgaactcctgacctcaggtgatccgcctgcctcagcctcccaaagtgctgggattacaggcgtgagccaccgcgcctggcctggacaaccttattttcatttgctgaatctaccatccttactctatcagcaagcccagaataggaaaacctggtttttccaaagcagagcttaatatcacaagagaaagagccttgaaaatactatagagtaaggcctcattcacatgggtgaggttgataatttacttcacaggtgagatgacagtatcaaggttctgtctggcctctggcctctggtcaattgattcaaactttggatcccagctctggtgcagctgtgctgcctaacctcagcaagtcactcccccttcctggtggtcagttgtctcatcttcaggttaggacagagtttctcaaccccggcactgttgacattttggtccagattactctttattgaggagggttatcctgtgtattataagatgagcagtgtccctggccgctacgcaccggatgccagcagcacccaccccaatttgccaatgtctcatgggaggcaaaatcatgcctggttgagaaccacggggttaaatgaccctatatcctaatatctagggctcccaccacttttaacagtcgagaattattgggtttacacatgaatttgtggcaaagattcctcttaaatatccaactcccataatgaatctaacaggagatgtgaatgaccagggtttgattacatgtaaactttttaaaaatgtatcctctacctcactcccctcaacctcattccagcattcagaaattgacctagcctgattccagcaagtggctccagctctttgatggccttacagacagcaatgacttaataatactaaaaaataaaattatcatcaccctgattgaagggaatgatttactggaacttcttgggcaaacagtttttgctagtttaatattaatatgactactactaacgatagagtgtgtagagtgcctacaacacgctaagaccacactaggttatgtcatttaatcttcacaatagacctaggaggttggtgctgtgcttattcacatttagcagttgaaaagaaattaggcagtttgcctaaagtcacagactctgcctgtgctctttccaacacagaaacagtctatttacatacagctctcacaggagtagggaaattcattcctccctgggcctccattccaggtaaatactcacagtctttcatctccaggaccgaaatctctaggaccacacagaaccccagtccttatagggctgccacgtacagacaacacactggcttgtaaatgtatcttgaccttgcttttaccttgaaccactctttgtaactccagggcctactgtaggagccctaatcagccctactgtaggagccaggcccacatcaggcactccctcaataaatggttgctaaataactcagtgttcccccatttcaaagatggagacactgaggtccacctctttccgtgcaagtcattatctaaaagaaaaccaacgctggctctcaggttttgtttgtcctgaatccaaaatcccccacagtgctgattcactttgttttcttaacttgctcttaagatcccacatttccttttgtattattagtggatggagagttgattggatttgagtgacctggttgcctggtggcccaaaggactggcccaggagaccactgaagagttctagagcctggatctggaactggggcctggaaaatcgtgtgtccgtgccctcagttactaggtcaccttgagtggggctgccacattgttccatggcccagtttcccctcggacagcatgctgagtgagattccccccacggcgtgctattattacctggcacaccaaggaattaggccactgctacaatgaggccaccccgccctccaagattcttcaaaattctgctccttagagcaggacaacagggcaatgtagggcagtggctccaatttgctgaggactgcaggatgaaagagggcatcttggggtgactgggtgaacactgttctgggacacccagctatgacagaagggaccacagaacaaaagggtgcaaactgtgggcctcaccctggggggaaatgggtttagaagtcatacacacacacacacacacacacacacacacacacacacaccctacatataccaccagggagtctaattttagtagccatttgccccagcaaagcactttgcaagtagttattttgagaaatggtattagccattcggttatttttaatgccccttctgtgacaggcatttgtgacataaacagcagctgaaagaccataaacccatagcccttagatgtgttcagggcccaggcagcagccccttgggatgtcccaagcccaattcaaatggagggaatgggcgagcatcttgtacgccctgccggtcccgcctcactgcctactgctccgttcactggggatgggcagcaagatttgactgaatgggaagcccctctggtctgtgacagccagtgtgctaatgacaaccttcagtgcttgccgacagagtgcaggtgaaaatccacactgctaatgaaggtccctcgtgggctgtccccaacctgatgttctcagaccctgctcccaacacatggcttccacactctctgccttcccacatcctcccctctgctcaagctgacctctcatttggatcagcccactcctcatctctcataacccagcccctgctgatctgcatgctctgattccccataatgaaagagctggatcacctccttggccttctgcatctaatagcttgaattgttggccacctgtgtacttgtatttcttattgaagccactgcatttactctgtactgaggatgcaccaggcatcattctaagcccttaatgaagttcagggaactttcctgaggatcctagctggtatcatcatcatctagattttcgagatgatgaaatggaggtatagggaagttacccaaggcttctttgcaagtagtgctctaagcaagactacagatgcaagagcctcacggtctaggtctaaccctggttctgcaccttggaaccatggacaagttcgtcagtctgtgcctcagtctttccctgagttcctgtaaagattaaatgagttaatgcttatatgatccctttacagatgtctggcacatgacaggcactgtctaagagtcctcgcttgtatgggagtggagaggagaggccagagtattgtaaggtaagatgtattagtgcctacaatgtgttatgcaatgtactaaagcattctgcatgtattatcatatttaatgctcataataccttgtgaaattttacaaagaaattaagcttagagaagtgaaatcattctcctgtggtcaaagccagtgaatggggatttgaaccaggtagctgaacacaagtctaagtttattaacctgaatcctctgctggttgtcttgactctctggaaactgatcatgtcttcagatttcccacagttcctggcactaggttgagcactctaaacagattcaatgccaattgcaggcttctgacaaggcttcctaaatgcagagccctggctgcagatcaggagaccctggcccctccaagggcaccccggctaatcagcctcttcttctgacttctgactccaccccaggacaggcatggtgcttcgaaagcagaagtaaggcagcagaacacttggagaagcctcgctgagggccagggcctggtggttcggatggcagcaagctgcccccagggacccaaaacccaaaggtcaggaatgtagtactggccagccagggcaggcactgctgtgtggtagaagagaagtccagaactgtgaggcgtcaagcgtgagttggaggcaggatggcagtgagaatgcacgcccaactgagcgagtgcgtgtgagtgaattatgtgtgtggttcagttttaggcactgggcagatttgcaaagctcatcaccctcctagagttgcctgcaaaaggccacatgtttaacaccacgtcaatcaatcaacggaggtgcactgggtggggagtgtgtggccaacccagcacggggagccgtgcagctgcagggaagagagcatctctttccccagtggctcatggtcatagccgaggacacaagactggcccttgtgggaaaattgaggggacctgttaaatgctgacctctaatgtggttccagttgagtcaccatatttcttgtgaacctccaaagcactggaagacttctgggcctcgcgtggctgcaggtgaaacatacagccaatcactccaccctggagtcttggtttcctcccctgcagaatgagagtgacgctgataagacatctcaggcagaggcgaaggaggtgagccctgtgggaatttcggctgcccctgtgccaggctgaacaagacagggcctttgctttctgggggctgatgagtcatataaaggggatagaatcaaacactcaaaagacaataaccgcaacacagggctgggtgaataaatacacaactggctactcagaatgggataaccatgggagaggacttttaatgccaaagaaactcaccacgttgcctttgactttgaaaagtgatctgtgcttaatctggcatttcgccaattggaccatgagcaatggggtcccagtcctcattacccagtgcctcctttgcttcaggccagggctgaataggtacttaggacattcctaagaaggactgtgcaggaggaggctagcccagctgcctggctagcctcagcacacacattccctggaacagcagcctcgcttactgccagaccccacaggggtttctgcaggggctggacaaacgggcacatggggatgaaaagggtagagtccccagagtcagtcaatgtcagtgaattggcagccgctgctcacagagctgtctggattctttgcagcccagagagcacctttcaccacccagatggggaggccttgccaaccctgagcccctcagggaggtcatacgtgtgattctcagacaccagagggagcagttttccagagagtgaagaaatgggatccgggaagcttggtgaattcgtctgctggggctgccatcataaagtatcaaaaactgagttggattaaataatagaaatgcattgtctcacaggtctggaggccagaagtctgacatggagatgtcgttggggtcagttccttctgagggctgtgagggcacatgtgttccaggcctctctcctagttttcttgtccttccttggcttacagattcatcaccgcaatctctgccttcatctttataggcattctccctgtgtgcatgtctgtctctgtgtccaaagttcccctttttataaatatgacaccagttattttgggttagagcccacgctaatgatctcatcttaacttgatcatctgcaaagaccttatttccaaataaggtcacattcacaggtacggagggctaggacttcattatctgttggggagacacaattcaaccaataatatttgagttcctcaaaggaaaaacagctttttaaaaagccaaactgaaattcctaacattactaatatactggaacagagtcccaagaagtaggctcaatgtgtgaaggagcttcccggttccagcccccacgttaccccagcccaggcctttgtggcctcccgcctgcactgctctgtgatgggccccttgccggctgccctgacttggcctgtctcccttctgctacctccgcatcaggctgccacaccttgcatctcaccaccaggtccacctcggtcacgacaccttcctggtctaaaggccccagtggcagtcaaccacccagagggctgactgtggctcactccttttgacttcagcacccttggtaatctgcaccaacagaaacatcggccaatgagtgccgtgatttctctgcccgttttctcattcatgaaagggagaaaaaacgaactctccatgcatctactcccaacacattcccctgagaagcctgcggggaagctccctgggagcccattgccaaagcttccacctcatggagctggcgtgtacacagacaggcacagcctgccgtgctgggccaccatactggtgactggctgtgctctggtcccagcccaaggggtgggcaaaagaggaaagccagcctcatgatgagcagaggacagggaagagacccccacaccagggactgacccctccattccctcagaggaagcagaggctactgagccaccagtacccccgcggttcctccctgtagttgctcatggaaagccaccagcctcaggaagtcttcctgtgtggaagctcactggcaccaaggcaggctgagcccctctgccaaaggttctgggcagccatcggtctgataaagacacagagccctccttggaggcctggaagccccacccctagaaggtggtccttgaaagctctgtcactcatttcttctccagagcccctgaagcatcctccatgcagctgtgcccacctgaccatacagcctggccctcccttagcagcaccctggactccattcctaccacctccttgacaacagaatcctgtctgtcaccctcctcaccaggtgcgggtcttcaagataagagaccacctcatgcatgttacaaggaatgctctagaaggagcaccattcaagaaagagaggacagggccgggcacggtggctcacgcctgtaatcccagcactttgggaggccgagatgggcatatcacaaggtcaggagatcgagaccatactggctaacatggtgaaaccccgtctctactaaaaatacaaaaaaattagccaggtgtggtggcgggcgcctgtagtcccatctacttgggagactgaggcaggagaatggcgtgaacccgggaggcaaagcttgcagtgagccaagattgcgccactgcactgcagcctgggtgacagagcgagacactgtctcaaaaaaaaaaaaaaaaaaaaaaaaaaagaggacaggttgagcgccctgtcagaccagtgggcccccaaagctatataccatgtttgtttacctacttgatttctcaacatcactgtgagggagctatgaacatcctcattttacatacaggtaaggtaactgaagttcagctagattaagtgtgttgaccaggacacagcactagcaagagcctgaggacacctggctcctgctgtcacctggctgtcttcacctggtgtcccacaagtacttcaaactctgctctccaaagctctgctcattgtcttcccactcgccatccttaccagcccctacccacactaccttgctcttcctgaatcctttgtcctcactaggacaccaccctctactctgctgaccaggcaaacaaaaggacccaggcgaacaaaaggaccagtgttgcccaaggcctctgcagaggtctgtgcatgcatctcagagagcgaactaaccatgggagttcagcactgatcctattgtgtccttccactggctttttgtctgagctcccactggaaaaaccctgcattcttacttgatgaattttcaaaagcagccagggctttattatcaactgtcttttatgaataatcaaagtccaatggggactccctaattagcctgggcatgaaggccatttgcataacatattgaatgcctctggagtgtcaggtacctcagtagacatgatggttcatgcactaaacctcagcatgtgaccaagcctatggccagacacagatgaacttgaaagtgatgcactggaagtcgatgccccttgagggtgggtgagctcacagagtctattcctgacactgttgctctcacctcgtgacaaagaaccaatgctgctttcttgcatccacccctgagttccagaacccccgcagacaggcttccaaaaactgtgtccccaaactaagactgtgtgatatgtaagaagaactggcaggggacccaacctatattataaaacctcttgatctcctaaaagagagctgagtttaacccgacttagatcaccaggacagatgctatcacagaatcttagaatctgaggttgtaatggtcttctccaattcaatatcaaatccagtgctcccagtcctcttctcctaggactttgtatttgaggtggggaataagggagaaagtggaagatgtggctaacttgcaggtgagtaaaggagaagtcaggaagaagtagtgacttgtcccccaattcccacactcaggagcatgggcagtggagggagaaggatgctgccactggcttcatttacatttgtccatttacaaataccatggcaacaagagctcaggcatgcaatgccctcctgcccagattcctgcttcaaaatcaaaacaaatccagtatgcctggaaaacctgccacagctcagcaaactaggaacaggtgccatcaatgtgccaaaaacctaaaggaatctgaaaaaaaaaaatcagttatgcagaaaaagagaaggcagggaggccccttgggcagctttgctccctgagaagcggcaggatggttgtgaaacaaggagtgaggcccttgaagaacctcacatcagagctgcctacatcagtagggctgaacagggaggtgagccaagtatcaggcaccgggactccctggtcactatggatcacagcagtgttcagcagcagcagcagctctgagaagccctgggaatcacatggcagatacatccagaagaaaactggccagggcaggggcttgtccctgacacagcaggtggcagctccaggaaggaggacaagtccaagcacagtttgtacctggcatgttggccaggttaaacagcaagccagatgcaaacagttggcacaaggtgcagtggctttaccaaacacagagaagaaatatcacaggattaagttccccttctggaactattcatggttccagctcactcacccagactcacaggtctctgcaaggcttcacttcatcatccagtgctctagtgcaagatccgagagtagcattctatgggcaatgaggtgcacagcagaggagcccaagagaattgaccctccctatttacaggcaaacactgactgcattcatggatgcaaaacacgaaaacctcccaccagaccttgaaaacattcttaactataaaaggtagagaatgcagcactcaaaataaataaatttgaaaaaaaaaaggactgggtgggaaagtgccattatcatcatggccaagagcacaggctctgctgtgaaactggctggacctgagtcctggcccccagtcagtacccagatgaggctgagtagggctcaaccctctggacatgcgtttccccaatctatataatgaggacaaacaaagcacatgccccttggagttgttctgaggtaatgcacacaaagtgcttagcacagtgcacagaggacagtctgtgctcagtaaacaactcgtgtgatattgtgataattgaacttggagaaaccatctattctatgtctgcagtaaaagtcaagagaacttatttctgaaacaagatgtgttatgaagggcacatttagaaagcactctcaaaatgaagaggaaaaaaatacagaagcagaaatactgtgaggtctaagacagattatacaaaaagatgacagatatagaggacaggcagccaattcagaataaacctaactgaaaagacgaaaacaaaaaaaagtttcttaacacagaagacagacccaagtctgaaagtcaaaatgctcagtaggcatgtatatatatatatatatatacacacacacacatacacacacacacacacacacatatatatatacacatacatacatatattttaatttcatggtgaagaattatcagcatccaaacagaagatatcagattatctatgaaaaaaaaagagaaaaatcaagctgatatctgatgtctcctctgcaaaacccaacagcagggccaagttgtcattcatattaaaagaaacaaagtgcaaagtgcgataaagcagaatacgttgttcaagaagattaaacaggtgttaaatttttcatatttgtaattaagacattaatcaaaacaaggaattcaacaacaggagatgtccatggtaataaagatctggcaatgaaccctaagatctattaggtttaaataattgttacaactgtgattacaaatcaaaatgaaaatgaaaactaaaatttattggaagagaagataaaatgtgaaaaatataataataataagtagaagttttaaatatcagattataccataaaagcatgagtgtaatattatggaatgggggaatgaaaagaagaaaaattatttatcttacgtggcaaggagtaagaggctatttcactctatacattaaccattggcaaaatatggttgaacaatagttttaaatacttgagaggcagcatgggtagacattccaatttaataaagaaaagtataaaataaaaaatttaaatatctattacagatagacaaaaaagactgcaaaaagcattttttaaaaaacagaaaggccaaaacatattagttattacaatcaaaatgtgtggtacacattatatatagtattaactatatgcaataatatataataaataaatatataaaattatacactgtttataagaaatataccctaaaccaagtgacaaaataaggttaaaagtaaaagaataaaccagaatatgccaggcaaaaatcaagtgaggctcacacctgtaatcccactgctttgggaggccgaggtggcaggatcacttgaggccaggagtttgaaaccagccagggcaatatagtgagacaccatctctaccaaactgtaaaaagcaagctaaggagtgatgccaagttaaaggcaatggtatccaagcaagtgaaattcaaggcaaaagacattaaataaggcaacacaggaggtttcacattgatggagataatccaaagtgagtatctaaaagtcaatgacttttaggcacaaaggaagcctcacaacacaaaacatcaaattgtcaaaaataagaggagacaagtgacagaaacccagtagcagtagaggagtttactgaagtactattgctctctcatatattaagttgtccaaaactaaacataattatgggtgattagaaggctggaatttctgcgttaactggtcaactggagagaactggtagaaagctcaaccctctggttttggaggttggaaactgagacgggatgatgagtcagtacagcacagactagtgtggtccctgggctttacctcaaatggaaacttattaaaaacacacattctcagacctatcgcagacctgaccgaaatcagaaactctggagtggggccaagccctccaggttgttctaatgcaggctcaaggctaagacccaccaaggcaacaattaagcccataggctctggagggccagggccaaatcctgccccatttcagcattgttgggtgacatcaaacaagttgcttaacctctctatgcctccattatcatcatccataaactgagaagaagaagaatagtgcctcctcttggcatggccctgaggacaagatgagatcatgtggacacaggctcacagtgcctgcacggtgtgagcactcattgatggcttgctttggttcaggaatgcttggcagagctgtgcctccagccccactgctctcctgcctcccaacacccagaggtgttgagggtgaactcctctgcacccaatcctctgtgcatgtgcctgaggaggatggactgtcccctgacaatggatggatgccacctcatggctgatcactgctgcatgaggcagtgtcataaacccctccttgatgctctctggctggagcggccagttgagtgactcatggagcttgtcatctcagggcctccttccctgatgcacacggccctctatccctgccccccagcctgattcctcctccccctggcaagactgcagagctgagcagaggctgacccgatctgggcccctcgtctctgcagaagagagaaagccagcatgcagcggactcctgggcaagttccaggatgctgtcctcaagtaccacgtggccactgctacccatggtggggtgggagcaggggcaggcagaggccttgggccacagaacaaattctctctgtctgtgagcagaccagggtcaggtgtgtcctagttaaatcaaaatgtcctgtggggcaggaaacagtttttccactcataaagatgcagttcaaatttgagatgtgtcagggatttcactgtggctgactgtgtgtcatcatgattagatcatacactcgagcattttagagctgtaagtccctatggaaatcaccctgtgtatccccctcctctgccaggtgagacccatgaaggacagagaggccctaaggcagccccaaggtcacacaacataaaaatctaacagcaagaatggaaaagaaactgccttctaccacattgggttgccatgaaacctaacagctgggggcgcctgggaagagagaaaaagtcacgaagtttcttcctgacactcccactgacaatcgtgattctgacaccagaaatgccttttcttcatagcatttcccttacatggagaaatacacctcttgtcttgcttcattcacagttaaatatgcttaggaagacgaggagacggaggcccgtactcttgagccacccacctctgaatccacctgcctctggatccaccaaaatacctgcccttcctatttgcccgaatgctctcatgtttcagagccctctcctccaggaagccctccctgcaaacttcatcttaccatccccttttccatcctggatactctagagaaatcagagctcagattgaagctgagtcctcagactttcagttgcgtctgatttggaaggagaaagaagaacccccacatctctggcacccccatggacaccaagagaagaacttcagtccatctgacagcaaagcctgaactctttcttcactgagttcaaatttgcctctaccactcacccaccctttgtcatcaggcaagccacttacaactctccgagcctcaattttcccacctggaaaagggcaataataataataccttcctcctaggttggtgtgaggattaaataagattacatgtgcaaaagctccaagcacccacaatagataccgaactggaagtcactataataaaactgataatgacaacgatagtgatggtgataaatatcattagtgtataatccatacttggaccaatttgggttttttgttcaagaccgctcggtgagctgagtgtggcggcacatgcctgtaatcctagctgcttgagaggctgaagctggaggaccgcttgagcccaggagtttgagacaagcctaggcaacatagctagatcctctcttctaaaagaaaaacaaaacaaaaccaagaccacttggcaactctatcaaagaaaggtaaacaggtaagagctttttgggttaaaatgttgcagggatctgaactcccacccctctaggccagggaaggagaatgggagtggtaagagacttcctagtttaaaaatataacaataaaatccatcttccaaataaaaactgacctagtacacattttggattttttttctttcttccaaagctctgagagttagttgaatcctttaaaaagacagcatgctcacctctttctccctagcaccaatgatttggagagacagatcacttcacttctgacattctagatacatctatatgttgggattctccgtccacccagctagggcattctatgaagccaagaatttagttctaagctcccaaaggaagctctatttcaaaaagccgggtggctttatttcaaattgaagaggccattaaattcacaatattttgccaaatgaatttctcagtgatcctgagcaatcctctgaagtcagctgtccttgtgcagtcatgggcccagcacagagcaggcgtacatactaagcacctgttccagcaggtagagacagtgtagtgactgggacaagcctctgccctcatggatccagcactccttaaacaatttctgaagaaactcaggggagccagtgactggtacattctctgtttgagctgccacaagtgctgcgggatttttcagtgctggaaggggtccccaccatattagcaacaaggtatcaagtgccaaacactgtgcgacatcttacctaagttttcactgggcattttctgtttagtaagtcaggcactgagggagggaacatgtgacatgtccaatgttcagcttggcaaacagtgaagagggggtccaatggggggcagggcgcaggtggctgggatatggtgctggagggtctctccacatagggatacaattgggtagcatctccatcagctgacgtgttcccaattgtcctttcttggttatctgcctgcctggcaagaatgtgtttcttacactgccgccatgagcttacacttcactcactatacaatttattccactcacttttcacagtgatagcaggttgcccatatggctttatctcttctggaaagggagagtgagcatgtcccttgccccatcaccctccagatatggtgtctgtgcagctggcaggattggaacccagttctgtttcactgctcttcaagtgtaaccttcatcatagtctacaccctgcagaggagaagccatggagtgggaaggcagtgatggggaaccgagcaaccgagaggggtgccagactagcccagatccttgcaaactttcccatgacagccctgaaggcagaaaagaagaaacttttacctcctacctcagggagtctggattagaatttgaagcaagccttccacaagcagacagtttctttatatatattttaaattttatctttttatttttgttatatttttagagacagggtctcactctgttgcccatgctggactgcagtagtgcaatcatagctcattgcactatgatgcaatgaactcctgggctcaagcaattctcctgcctcagcctcccaaatcactaggtattacaggcatgagtcaccatgtccagccaggaagcttctttaaattgttgcattttatcttttaaaatatgtatgcatattttattcctcctcatgacaaatgtgattgaatacaaaataatattcattcccaaaccttcaagaagaactggttctccaggaaaatgtgccatgattatactgcagcttctagcattccctgtgaggctctgggctgtgcacctctaatgctggaaagtccaaatccaggagactcgggtctcctgagattccttggccatctgttcattcatgccatccactcactgattcagggcccagaggagcaccagggttaacggctggcggctgagtcagcagctctcaaggcaatcaccttttccacctactcatgaatcactaacctgctgcccccttgctacgtgcctggaaatgcataaatgtgcttaaaataagtggtacctgggtagcaagtttctcaccagcaggaaccagtccaagtgagtacagggcaaatagcagtgcggggtgaaaataaagactgactaccactggcaacccttggtcactcttcatttattcatccaacattgctgaatatttgccctgtgcaaggctccatgccctggcaatggggggcacttgaaggcaaataagagctttacaaggctctaggagatgtcactagtattccaaaaaccctaacagaagatacaaaagattagtgccattagagaggaaatggggtagaagctttggttggggggaagctcattagttagaggagagagatgttacttctaacttagaacatcaaaaacagaagcttcctggctttagccccaggccatgaagaatgagtggaatttcaggatacacagacaagaaagcagaaaagataaaatgaactcccacataaggcaggagataggggtgactagttatgtgggttgcagcccaggaacacagggaggaatgatggagatctttgagcaccaagaagagaagtttggactttttgttttcctttggttaatgaggagccatgaaagagtatttgtggaggaaagtgaagtaattagctaacatttagaaagtttaagtgggtagtaagatgtatgactaatcagaaatgacagagtcacgagaccagctggaagagtactgcaagagtccaagcaagcagcaatggaagcctgaactagaaaagagacagcagcagtggagaagagttgagccacgaggatttggcaactgactagagaaggcaccaggagaagcaagtccctgaaaaccatgctgcttgggaaagaccaactctttctctcatttcctcttagggaattgtaaaaggaattccctatcaccatttaaatttggttaaattcaccaaagagtgatggggtgaatcactctttggtgactaacccctctggctcttgtgtagagctaattagagtttcttctggaagatctgaaaccaccaacagtgagactcctcagatgaccctgatgggcaggtccatgattcaatctgtttcttccagcatctccccactggctgcagcacatctaggggttcaacctaagggagcccccctactctgggtatggttagagctcctttcaagatcattctaatatcaaaagagggaatcttcaaggagccttgttggcttcttatacttagagagaaaccaagaacacagtcagagttgatgtttttaaataccaaatctgtatgcatctatcagagagacagagagagaaagagagagagagagttagagagagacagagttttgaaacatggagagagggaaagagagatgttcctagagagagagagagagagagagagagtgtgtgtgtgtgtgtgtgtgtgttagagagggagagagacagagagggagagagagagagagagagagagctttgaaatatgaagagagagagggaaagagagatgttccgagagagagagagagagagtgtgtgtgtgtgtgtttgttagagagggagagagagagagagagagagctttgaaatatgaagaaagagagagaaagatgttccgagagagagagaaagagagagagagagagagtgtgtgtgtgtgtgtgtgtgtgtgtgtgtgttagagagggagagagagagagctttgaaatatgaagagagagagtaaaagacagatgttcctatgaagccctcagctcctaaccctctctctggctcagtgtttgaagcccctccagccgcccatggcaaaacttccttccagaggagcaggccatgcatcccagacccatgtgtatgctgtcccctaagaatgagagcagtgctctgtttcccaaatgggcaggggaagcaaacttttgtttccatagtctataaaacatttttaaatttaaaaacaaatgctttgcagcctctgaattattagttttttattaaaaatacaaacagctctatggaacaccatgggaaaatgaggactcttgcaacttcgtttggctccctgttaaacagaataatgttcatgaggaagaaggtactgtttgttccttaaaatgttgtattgcgtacaatggagaagagcaacgtggagatgactttccaatgtgttcccttgaaatgacctgaggaccgaatcaggaagctcagtctgaccagctcagcagactacccccactgccccatcccagagctgaacttgcagtcagccctgataaaaatctctggactagaaccagagcaccaatatcaagggattatccatgaactgactgttctttcctgcaggcaggctccacgctcctgggtggccagagtgccaatcagccctgtcccagtgctctaacgaggtgcccattcactgcccaagagacaacatgcccaagctatgacccagctccaagatctgaagggaccagactgccttcctgtttttctctgcatcccctgagctccctcttgaaaagggaaggaaagctaacagaaaagccactttctcacacacttttggtgagatttcatgaaagctgcatgacctttctggaaagcaacttggcaatgtatagagaatcttaaaaaacatgtgcatcctttggcccagcaattctgcttctaggaatctgtcctaaagaaacaagtctgtgatgtaaataaaaatggacatattcagttcttgactgcagtgcaacctgaaacactgaaaaactgaaaataactcagaggaccaacaatagggagatggttaagtaaactgcagtgtatctacttgggaaactaatatgcatcatttaaaagcatagcttcaaagaattattgataaaacaggaagatatttatgtatgcatctaaatgcatagagaaaagagtgacataaaacattcaaatatgaacagcaatcatctctaggatttaactgctgctttcatttttatttgattttattttgagacagggtatcactgtatcacccagccggcaatgcagtggcacgatctcagctcactgaaccgcaaccccctgggctcaagcaatcctcccacctcaacctcctaagtagctgggactacagatacgcatcaccatgcctggctattttttttttttttttgtaatttttgtagagatggggtttcatcatgttacccagggtggtttcaaactcctaggctcaagcagtctgcctgcctcggcctcccaaagttccaggattagaggcgcgagtccccccactcagcctgctttgacttttatgctctttttattgtggcaaaataaatatcacataaaatttaccattggaaccacttttcctttttcttttttttttcttttctttttttttttttttttgtagaggtgctctctccctctctctctctttttttctttttgtaaaggcatgatctcactacgttgcctaggctggtattgaactaagtgtctagttctatagcacgaagtacattcacattgtggtgcaactatcatcaccatccacgtccagaattttttcatcaacccatggtgaaaccctgtaaccaaaaacatctccctattccctccacctccagcctctggccaccaccattcgctttttgtctctgtgaatttgcctactccaggtatctcatataagtggaatcacacagtattgtgttttgtctttttgcgactggcttattccacttagcataatgtcctcaaggtgtgttcacccatgttgtagcatgtggcaggattaccttccttttcaaggtagaataatcactgtatgtctatgccacattgaacggacatttcagttgattctacctcttggttactgttttttgttgttgtcattttgttgggttttgttgttgttgttgttgttgttgttgttgttgttgtttgacagagtatcactctgtcacccaggctggagtgcagtgatgcaatctcggctcactgcaacctccgcctcccagcttccagtgattctcctgcctcagcctccagtagctgggattacaggtgcacaccaccatgcctggctaatttttgtctttttagtagagacggggtttgaccatgttgaccaggctagtctcgaactcgtgacctcagtgatctgcctgactcagcctctcaaagttctcggattataggcgtgagccaccatgcccggccctacctcttggttattgtgaataatgctgttatgaagatgggtttgcaaatatcgttttgatttcctgcattcatatcttttggttatataccccaaagtggaactgctggatcatggtaattctatgtgtcatattttgaggaactgccatactgttttccacagtgaatgcatcattttacattcccgccagcaatggacaagggttccaatttctccacatcctgtcaacacttgttgttttccaacttttttgataatagccatcctaatggatatgcatttttatgcttttatgtattttcagaatctccttcgggaagcatgtggtatgtttataataagaaaaacaaaaattaacgttatgttttaaaactgtgctagggaatggctcactggatgttatccactttactcctcaatgctgctgggctaacagtcctcctcccaccctcagcaaggcacagctaaattctggggatcattagttgtcaaacaccaactctatggcaagtggagtgcaagaccctacaaccttatggggctgatatcataacccaattagcacaatcccactgctgctgcttggaggcctggttctccttccatgagtgttgctcctttctccccactcctaccccccacttcaagctccaagcgatgacaggagtatagaaaggaaagaaaagagatttggggattcacacagtcctggggtacaatcgcagctccacagttgctcagtgataagataagcaatgtcaccttcctggacctcagattgctcatctgctaattgggtgatggtatcaggttcataagtttgtagggtcttgcactccacttgccatagagtcagtgtttgacaaataaggatccctattcatttctggaattgtgcatagcttctgccacaggaagaaatacagcatacctactagtaaataccacttaattgactgattgaaagaaacccgtcactgtgaggatcccaattcaattatttatgtcctctcctggaagcctctatggagtgcaggtttctcaaacatagtcctgttctcttctcctcaaacaaaggatctcaggatcaaataagcctgggaagcacaaagattgttatcttcaaaaacagcaaaagaataataattaacatatgaaaggtctgtaaccaagaaacctatgtttctctggcaagaccctgtctctacaaaaaaaaaaaagaaaaaattagctgggcatgggggcacacgcctgtagtcccagctacttgggagcctgaggcaggaggatcacttgagcccaggaattcaaggctgcagcgagctatgacagcgccactgcactccagcctgagcaacaagaaaggccctgcttctttagaaaaataaaaaaggagaaacctatgtttctgaaacatattgaccactgaacacctttttggcataacgccaattaacaacacatggagatgactttccatgtggaaacacatggaaataacatatctccaacacatggagataacgccgattaacaacacatggagtgagcagtgctgctccactcctcatccgacctgaaacctggaagtctggttcctcaaggacatcgagccttgaatttccacatgcaaacacctgtgagtatgttggggctgctgcagatcagcagtctcaaaattcatagagcatgagaatcaccaggaaggcttgttaaaccagcgtcctgggccccagcctcagtttctgattcagcagctctgggctgggacccaagaatgtgcatttctaacaaattcccaggtgatgctgatgctgttgacccagggaccccattttgagaaccactgatgcagacagtcaaaaacccctcacatacaagtttaatacaggaccatacaggaaatctgtctactttctgcaatgccaaagaaatcaagtataattcagaacttgaaacatccattctcttctgggacaagttcttaaaggaagcatttcatagtagttaagaaaatggactctggagtcagaaaagagcacgtttgcaagtcccagatctcccagtgcctggctgtgtgaacacagcaagttattaaaacttcccaagccacagcctctttatctctaagggagagaaaatcatggcaatgcctagttcatagaatttctgtgatgcagaaataaagcaagcaggatgcttggggaatgcctggcatctagtaagtgctcaataaagattggttattctttttaatgactgttatttaatcatcttatctggtaaatagctcatctgcgtactgtcagctgacctcaggatgtgactatacagtcgtccctgtcatgggcgaatgcaggctgatggcacaggggtaaaagaatttaccaagaaaatcataggtcaagaaaggcagatttattagagaaagtggggaaatatgttgcctgagagacaatgggcaagttagcctgagagaagctaacttccagaagacaaaagcttgctgcagattttagagaatggaacttgggctgattgataatgccaaggcagcagggagcttaacttgcattcctctgtcagcctggatgtttgataaattgaggtgtttgatggtgagcaggaagcccgggagttatgtatgttatccgggcatgaaggccaaatgtcttgggtcatatatcctgggccatatgccctgggccacaaagaaaggcagacctgtaacttatctggtttctcttttgtttaaattctctggacgtgaagaaaggcagatttatagcttatctgctttatctcttgctttcccctggtcccaccagcctgactccttttccctaattaggactccacagtccccccttatccatagtttcacttttcattttttcagttacccacagtacagtacaatgaggaatttttgtgctctgtaatgagacagagcacagtcacatgacttttattacagtatattgttataattgcacaattttattattcattactgttgctcatctgtcactgtacctaatttataaattaaactttattgcagatatgcctgtgtaggagaaaacacagtatatacaggtatcggtactatccatctgcagttccaggcatccactggggtcttggaatgtaacccctaaagataagggcatctactgtatttggagacagggtctttaaagaagtaattaagttaaaatgaggtcattagggtgggccctcatccaatataactggagcccttataagaaaaggagattagggcacagacttacactgagaagacagtgtgaagacatggggagaagacagccacctacaagctaggcagagaggcctgtgatgaaaccaaccctgtcaacaccatgatcttggacttccagatagtaaggactgagacggtatatccgacttgagccttaagtccaagccaccgttccactattaactcccaccaggacaagtgcagtggcctgaggggcccttctgcttccactcctgcccttactccctggccttactgttacaagagtgaacttcaccagtgttaaccagatcacacgcgtggctgcctaaattcctccaatatgtcacctaatactgagaaggaaatccaagctcctcaccatggccaacaaagccctgaaaaacggcccctgccagcctccccctacccagcatttcccccacccccaccatcaccacctcatgccctaaactccactcagagtggcgtttttgctgtttcagaaacaagcaagctaatccttgccaccaggcctttgcactagctggtgctactacgtggaacgctcttcccccaaatttcctcctggctggcttcctctgagttcaaatgtcttctcctcggagaggcttttcccatccatcacaaagaaaccctcagcatcatctcacgctattgtcttcctacaagttagcagtagcttatcactgtctccctgagagcagccaccgtagctatcgaatgcactgctgcctcccgggagcctagcacttattccaaggccttggagcttagtaaatatgtgttgcctggataatgtatgtgaaagagctttgcaaactgtaaagtgctgcataaatgtaagataatgtcacaaatatcaaaaagagccagccaaataattcaaagaaaataggaaacaaggggagaagagggatgaggaattcagaatgaagctgagagatttcaagtgatgattcaagaaataaaccaagcaaccaattttgttaaatatgtgaggccacagggcgagggaagcacaaaccactccaatgatccattcaggccatgtctgctccactcagccatagaaactgcataaattacaggcagcagcagttttcctggagccaggcagtagaacactctccttggtgccggcctgggaggaggatcctggcctggcaagcagggctgactcaagctcattgcattagccctcccctcctgcatctgggcccctctcaccgcagtgctgcctgcccaggacctgcactcctccagcgggcgggactgtgactcacagatggcctgtcactcccagtgccagcacagagcaccacccgtgcctatctttagaagtttcgcaggctgaaaaatcaatttgcccgcctggcacctgggtctggggcctccccgctaacatcagtggcaggcgaaatgtggcctcccctctgcctgccctgatgcgtcagaccttactcagggtcccgagggcctggcagtgccgcccaacagactcctgtgagctgctgcacccacaggtgtgctggtctgcccctcagagatagccaggcctcaccagaagatgcgggcaaacaccacgccctagaaaatactggcaagggggaagcgaatcactttgcatcctggctgcctgactggcacattccccaggtggtcatctggcacctaatccatgtgtggtcacagcaaactggcttgcccaggtggtacaagttcagcctcttcctccaagcagggaccagaggtaagagaacagcacacaactccacgccttaataaaaaggcccaggaggcagattcccaacgcagtgacaactcccagctggcccccaggcttcccaactactgaaaatggccacatgtgactcccacaagccaaagggaccctgtattactgggtatgcggagagagaaccatctcagacatttcaccatattaataatctctctttcaataaagactcgctgagcacctggcagtggcagggtgggtggaatagggtaagaataagctgaggaacaagagaaaggaaatctctggccctggccctgtactttctccttgcacctgtgggcgctctgtgctcagcctttgagatttccaaatcccctctgaccttctgcctcttcactcacgtctagacaccatttttacagaaaccaggagctactgcctgttttgtttttttttgttttttttccagtaatacagcctagggccctgcccaccccacctccttttctttatgagatacagtgaagtccagctgtcctgcagcagatgaaaacagagagagggctctcacccgctagctctagttgagaaatgagaatgccccagaagagcttaagggctcaaaagccatctctgagaatttgcagaagcacaatcctacatgtttgcttccttaatccaaaaaaggatccaaggtcatgtgtctacaggagccagcctgttacggtgagtgaggggtgctgcattcagcaccgggggatgggggggaaaggagagcgtgcaatggctctgcccaaaccaatcatcaccatgaggggacacaggcacacaaaggtacattttcaatcttttattttttcaaaaacagctagcaatccagatttttatccaaaatctcctttgtaaatataggcaattgatgaaaaaaaaaattaaaaaacaatgaagccacatgggctaaaccaaacacacctgtagactgccagtttgtcccctctcataggtaggatggggtgactgaattctggggagcacgttcagaggtcgctatctttctctgcttctccccagagaggtcttcctaggctgcctctcagacacacagcaccagccagagggcaaggaccaactgataagccaggaagtgtggctcccatcactttgaggagggaatcaggaactctttggaaacccctgctgtacaccttgctggtgccatttcccaaatatttgtggttcacccctcggctttcagtgtctctttccttctctgcctccccacccagggctaactcctctccttcctgaagactctgttcaagcatcagctcctccaaagagctgcccactaagcagtgcccctccctccagcccctgggctgggaggcttcccggcacctggcatatcatgcactctgcatgcccacacacaacttccaggcacttgattgaccctcactagcagggagctcctcaagagaagggctggttctcttccatccctgttatccctgcagccagcgcagatcttggaacacagagcagctccacacagaactgaaccagcaacttctccaggagcaaatgttttctgagcactggcctataccaggtgcatgcgaagggtgcataaggccactgagatgaatttgacatatccaggggcttcagaggatcacagtctcttgggtctgacagatgtttaagaaatccccatcatgtagagtacccacagcccacccccctactccgccccgccacagccaccctcctcccatccttcctgggtcttggccacacttgctcttccttctgcctgcaacatggccctttcctgaaatctgctccaaactccccttaacaaagagctttctctccatgcaccctccatagcactattttttcccattccctgtttcatttgtgcttgtgcacttatggccacctggcttctcctgtttccctatttgtcctgtctgtggtctgtctccactactagacctaacccaatgagggcagggcctgcatctgcttcgttttctgcagtatgcccggtgcagaggacagcgcctgacccatggtaggtgcacagtaaacagtggttacccgaatgaatttaagaatgagaaagtaagatacgttccaaaagctctgcatgctgcaaaggcctctgagcctctatatgctgagaggcagctggacctctgcctcctcctttgcacggtgggcagagcacctgcagaactttccacttctcatgcctcatcatgtgtctgggctccggctccggtgctgcaaagcaggtgaagggccccctgtgcaagtgtaagaggctaaaacgggggtgcctgtgtgagcggctggtgtggggtgggcacctgccggtgtacgggagactgaagggtggagagggcctctcatgcaggcatgtgtgagcagctgcaggtgtgtgagcaaatgtgcatcactggggaacaggtgtctgtggatgagggaggaagtgagggtgagggtgtttgtggacatagggatgtgtgttttttacaaaaaaaaaaaaaacaaaaggtgaggggaagccggcctgcatacatgtgcatgcatgtgaacatgcgtgtgtgaatgtggggaagggcgcattggtgaaaaaggtgctggtgctttttctccctgatgcaaactcaggctggagagactgggactaggcagaccctacccttggcactccaggaagagttcctccctctatgaagagctgcctgacctcattcaaggtgtacagaaagaaagcagtgtcaccggaacccaggcctccaccataaatgggccagaggcaattccacagcagtaaccgggcaggcaaaaccacccctggaaaacacaagctgacacgaaggatgagcctctcaggccccctgggcgtggggtccctggaatccctctgtccctggctcctagtgattttacaccaaggctgaacacatagatttgaggcaccagtgcagtgcaggacatgggcgtgttattaccagctccatggttaatgagcattgcatccactgggagcagccaggctggggatgctaagacctgctgggtggttctgctgagttggggctcatggggcaagaaggccagtttctgccagcccctcccagcagcagtgagacaaggacacagacactgaagggcccgtgttctcagcctctccccctccgactcctgcccatcttcctggtcacatctcctcccaccgtctgccttgcttgctgagtccatgcatttgttcatttccccattcaacaaggaggtatcaagcaccactatttcccaggcacattcctagggtgtagaactgaaaaacacaggtaaagtactgcctccatgcaacagacattgtagttgaggaaacaggcgataagccaaactgataagagaaatataaggtgtgttaagacaaatataagatggtgacaaatgccccagagaaaataataaaatagggaagggaggcaggaagaggggccgttaatcagggtagccaaggaaactctccagcagccagcctcgttccctccccagaggcttcacagctgctgttccacacacctgaagtactgttccctcaaagatcccccatagtttccttttccaggcaagttgatcttgttccactcattggccacttccttagaaagaccctccctggccaactacataaaacaggttccccattgcactcacatcactatccccttagcctgtttcatattctaaaaccagttctcattatctgaagttagtttattatttatttactatgtttctgcctcccccagtgaaatatgaggtctcaaaggagagaggatgtgtgtcttgctgaccactatatcttcagcacccagaacaggccaacacatggcaggccctgggactgaaatttcatagtccacttcttgttcctttgggttaagcaatgccctcccccagcatccatttaaaaatactctcaggcaagtgatacatgaagtcatgaacactctagtatgaatccgtcacttctctctaggggctgctcagaaatctaggagcacgtgttagtactgagggaaggggacagggccgaaggaagaagcccacaggctgcctgcccaagcacaggactggaagggaggaggcctgggtgtggtgccagctctgtccccagcttctgggtaacctctctaagcatccgtttcttcatgacttagagctgagagggagctcttggtcacctatgctttggggactccagcggggaggaaatgagtcaattaggaggacatgaagttggctgcctcctcactttgccatcaaagacaataggtctatgttctgatccctgcctcagacaaaatggagaaaacccaaagatagtgggaagccgcctgcactgtatgaatgcacgcttggagaagactgtctccctgctgcccagcacccactgtccacgcatggttactattagaaagttaatcatggaaaatgctgaggtctctttccccagccctgcacctctcagctccacactacaatttcatcttccatatagtgttaccagacagtgccattggctccgtccactcacttgtcccaggcctttatgacctttccattcaagccacacaccacgtctgctccacagagctgtaagacacactggcttcagcccgcctggcctgggccagcacgctgacattttccatgagtccacatcagccagtgaaatgctcagaggggattaaggcaaccttctccatcacccccgagttgctttaggaaagagaataacagcactgacccctccattggcagctggtgatatccacacaccatctctatccagagatgaaaggctccttctccatccttgacttgcaaaacagggattatttcccacctcacgctttctgaaatatcaccaaagatgcagctgtgtttgaaggccagcctcataaaaggcgtaggacccacgtgtcagtcaacactccactgagaagataattgattttttttttgttttatgattatttgcgggcactggttctctttccattagcctggataatcgagggaagactgtaaagagtattaatatcacggccaaggtcactcagctggctcctgctgccattccaacccaaaggctgaattactatggcttttactaataataacaagaacaataaataacatgagtgattataaagccagggaactctgcaattacctcaacaattaacacatcccttcgtgaaacacagaacagaaaaaattttcaaaggttcaagttagaaaacttctgcattctgtttggtgcaagtgacagtcagaaaagggccttgtttgagggtatgcagtgtgagagtatgcagtgtgagggtatacatgaggtctgcagtatgcagtgcagtgtgagggtatgcagtgtgaggtgtgcagtatgcagcgtgagggtatgcagtgtgaggtctggggtatgcagtgtgagggtgtgcagtgtgaggtctggcatatgcagtgtgagggctggggtatgcagtgtgagggtgtgcagtgtgagggtgtgcagtgtgagggtgtgcagtgtgaggtctggagtatgcagtgtgagggtgtgcagtgtgaggtccggggtatgcagtgtgagggtgtgcagtgtgaggtctggcatatgcagtgtgagggctggggtatgcagtgtgagggtgtgcagtgtgaggtctggggtatgcagtgtgagggtatgcagtgtgaggtctggggtgtgcagtgtgaggtctgggatatgtggtgtgagggtatgcagtgtgagggtgtgcagtgtgagggtatccagtgtgaggtctggggtatgcaatgtgaggtctggggctggctccagttggtttccaactttaccaggtgtgtggcccgggcaagtcacttcatctcagcaggttcctgcacataggggctggtgaggactcaaggataaggcacactaaagggcttggcacagtgaccagcaggtagcagcactctctaagtattagctgccattgttgtctttatcattaatgtaactacatcttaattaggaatgatgggatctcatttggcccccacaccaatccaggaattgagatgagaatagtgtttcctctaccatccatcagccaatatccagcagccaccccaggggaggccactggtcatcccacgccatataaagttcactgcccctggatggtaggctcaccccaagcctgctccctcatcctcattcccatcctcaacagagaggaaagtccaccactgtctccattttaaagaggcagcctgtgacatccaagagaccttccagcctcagggaaaggcgtgaacaagagctccagctgggtctttacagatgaagccccactttggtacctcttctcctaacaaccccagcttttggaagacatcaaaattccaaaggctcagctgcagaaagatcttccaaatttctcattatagttattccctgaaaggccaagagctttattcttcatccatttactcaacactttcatggagcaactgctacgacgtgtcagcctctgcaggaggcagctttaaactaagtgtgacagatgagaaagaaccataacacacaaagcagggagaacagtgattccagccaaagaaaacagcatgtgcaaaggccctgaggtgcataaaatttggcatgttctctgtggatagggttctaaatcatgtccaggacagggggacacctttgtgtcaccctcatctgaaagcaacctttaagaagccacaggacagactgtcttcaactcagaaaacctccctgatacccatcttccatcctccacccctacattctcactcttgtctggtttcctcagttaccatcctggtgcctaatttctggtggcagcaaagtgcaagattagaggcccacacactagtgcccggaagcttgggcttcaatcccagatccgccaattatggcttcagtggtttggggcaagtgatttaactgcctctctgtgcctcagtttcctcatctgtaaaccatggataacagagaacctctttggagatctgctgtaaggatcggacaagtaaaaagaagtgaggctcttggataaataaatatctaaggcacatagaagttccctgaaaatgtgggcattatcaatatttattttaagcatcatcatttttcttattatattccctttctccatctggtcccttgagagtgatgactcggttgaatgaatgacacccaccccagtttctcaccccatctcccaacaccaggatccttttgcctagtgggtggttatcacttagatgtgcccatccccaaacctcacttgatatagtgatttctggagaccctaagaggactcagggaccaggcacggtggctcatgcctgtaatcccagcactttgggaggtcgaggcaggtagatcacctgaggtcaggagtttcagaccagcctggccaacatggcaaaacctatctctactaaaaatacaaaaattagccaggcgtggtggcaggtccctgtaatcccagctgctcaggaggctgaggcaggagaatcacttgaacccaggaggcggaggttgcagtgagccaagatcatgtcactgcactactccagcctgggtgacagagcaagactccatctcaaaataaataaataaataaataaataaataagactcaggggacttcctgcacattcccatgagccatgagccatctccaacaccttggggcagagtaggggactctatgactccactggggaaggggtcctgcaatggggcctgagatgtgctttcccccagctgacactcttttccttatttaactttttcaaaaactcccccaaatgttttgccttttcatttgcctcgcctcctccttaacactctccacctgccccaaaatccccagtagtttcaaaattgaataactgtcgggaacagcatttaaagatgctaatttaaacacacgtgtcagaaaaggcaagctggatccctgctcctagcaacagcccctcacccacacctcacagctgctgctgcccagaaacagggcttgcttgagtgagctggcaggggggccggatacagggaagcagagttgtgggacctagctctgagcctgcttctggcctttccccttggatggaggtctttatccttgcagggcagccttcaaaggtgcaaactctgccaagctgccaattcctcaagaaaggggtcttggggcaaccaatggtttaagtaaacccattgtatcacattttgaacatacagaactgctaacacagagacctctaatttcctttaataaacccaaactcttccatttgagtaagcttcatacattaaatagcaacacctactgttaaagcataacaagtctcctttccatttttcacatcataaatgtaagtttgggtcccatcaaggggcagattcctctaagtgccaatgtaaagtgccccctcctctatgtagtcctcctgaatgaccctccatgccacaggtgggagtggtcttttcctcccctgaactctctcatgctcttcccagctatctttcattgtagcaagatcttggtcaagctcatgcatagcttatctccacttctagactgggacatccttaagaacagaagctatgtcttactcaaccttggacgtgccccccccccttgcaatcacaccacagaaccgcatagtaggtgcttaataaatagttataaattattaacatcagtcaccttggagctctccaatttaaagaaacagttttttaaaaatatgtatagtaagtagacactgccccaatagttggtcccattggtaaatatagcttttcatgtgttgggtttgcttcaaatggaggtataaaaacacacagaaagaccaagacagaagctaaaacatagggaatgcaagcctggtaacctctacctgggagagaaatttgcccaactgggcaatgtgcaggcaaggctgatgtcaagggaagatgctggagaagagaaatgctactgaaagagcacgcaagtgcctttgcatctccaggtaagtgcttatttcaagaaagtgtaaagcagctatgtttcttgatttggatgttagttccatgggtgtgttcagttttgaatatgcatatactttgtggtgtgttcaagttttagtatcatattatatagttcaacttgaaaagtaaaaatatttgtgggatctaaaaaatcaaattagagtagaaagagagttaccagaggctgggaaggggagtggcggattggaggggaggcaggatggttaatggatacaaaaaaatagaaagaatgaataacacctactatctgataacataatagggtgactatagtcaataataacttaattgtatattttaaaataacttaaagaatgtaactggattgtttgtaactcaaaggataaatgcttgaggagatgaatattcactctccatgatgtgcttatttcacattgcatgcctgtatcaaaacatctcatgggctccataaatctacacacctactatgtaacccacaaattgttttaaataatttaaaagcttttttaaaataaatgactaaacaatatttctcacatggaaacttatcctcgatgtccaagtgaagttattgtgagaataggggttgtggtgcaaaaattcactctctagagaacacagctgttaccacctataaagaaagcgaggtctccactcacaaaggaaagcagcaggagtatgtgagatgtcgaaggagaacgtggaatgcctaagtaataaaacagacacagaaaactttccatccccacggtaagagaagctttggcagagtttgctcttcagcctcagaccaacagagctccagcatccaaatgctgaagaagccaagaatgtgcaaactatgctctctcagaataataagaagaagaatattcccttctcctctgggactcttcaaatgttttgaagtttctgacactctcaaaaacatgcagaaaccgcagcctgaatttagaaacctcagcatggtggtatgtgtggtatgagttccaaattctcgacagccctagaaacctgtttctagaggagaaatgaaaataccaggcacactgatgcagcttgtgggttgctttattgctttatttagggtggcagctcgggactgagggacctgggtctcattatctatcagctacctccccactcacattttctgcaattgacatcatgcacaatgagagccacctagctggtaagagaaggctctaaagactactcagagggttatgcgggagggaagaggaggaaataatatgagcccatccacttcctctaaacactggggtcgagggctgtcatggatcacctgcacggatatgatccccggcctccctcagcaccagcaggctaagccgctgtcactgcctgaccccctaacccagtcaatacccaaccatcaagatcacagtcctcaaatgagctcactttcagtaaggtaccgtgttcgatttttctttggacaattttatctggacgatatctaccatgacttaattttgtagccaatgtatacacattaaaataagatgaaaacaatactttctggacctcatgcagttctaattaatataattccatatggatttatggataccagttgtgttctagacactgttgtaagtccttggaatcaggcagtaagaatatgaaaaaagagaccaaaatgagaattatctccagaagagaaagcacatccagcctggaatatgtccttacaggttggaacccgttctcttccagatgccttgaggcttctttaactttactctttctcataaccacccagaaagtgcagggttggagactcaatggttgatcaatacatttattgaatgaaaatgacaggccctacaagtagtttctggaagccctgccaacattttcccaccctgggttctggtactgctcccaggctgtgtggcattgactagagtgcttcaacggcccactggccccacacagctggtgcctggggcccagggtggatccatgagtttgggcaactcctcctcattcctggagctcagtttcttcatgtgtaaaatgaaaggattgaagaagattgtctctaatttcccttccaagttctagcattctgtgatgccatgtgcaccccagttaagtgagaactgccctttgctattcatggaggcaaaagatgtcaccctcctcctcgttactaacatggccccatcttgtccaggttcccactccttctccacagtgtcttgcacctcagataaactgaccccattccctcaccagctggtgggtcctgtctagtttacatcagggcattcccattctattgacactgactgatttggagccaggcaagtggcctggttttggtcaatgagaaaaatgggagaagtatcgggggctttggagaaagattttctctatatataaagtcctcaccagaagagatggtccctgccttgactctggacattgccatgtccagatgtgatgtccagaaccactgcagctatcttgcggccatgagagaaatcagacttggtataaagctgtcactaaggacagtagggtgaagaaaagaaagggcccagggcctcatccacatcactgaaccactgatccatccatagtggagcctttcctcccccaactctgttctcttatgggagatacatttccttactgtctaagccaatttgagtcagtgttcttgatcattagtaatcaaaagcatctaactaatgtagtggacccccaatttggaaagaatgaaaatattctgaaacactcaacactaaaactactgtacacagttgaatctttctaatgtctgagaaaatgctctacaacactatctggatggaggttaccctttcaaataaatgcctgacatcctttctttctcaaaagccaatagcatccagatatttgcacttttcggttgcttggtttctagacaaatgttagtggcccgatcattcctacaagaaatggcactgacttgcccttctccatggagacgatgagcacagccatgaactcaattcaaagagcagcagaagagtcaaaagtggcaccttgaaactgaattctctgttgtgttgattttctgagctttcaaagtgttattcatttttttctacctgtgaatgaatccttgatttctcaatctgcctactcgctgagatagatttcagcaaaataacagtagacatgggtttccttctcctctctctctctctctcttccccctctccaacttcccatcctccctctccatatctccccctctctaattcaccaaggtaacaaaagaaacaataattaagtcaatgagcatgctcgcatgtgcaacaaaaaatacctctcttattacattgccatttccttttcaaatcctttgggggcattgtgtacaaatatagtaaacagcattagagggaaataatgccgacacatacttctgggagctcgtcatgtccctttaagacaaggcccactgttcagttccattctaggccacagctcgggtttcaagcccaaggtccccttactgcctcatgcagtattaatatggccctggcatactcccaaatttacattatgaaccataatctgggccagctcccacaggacgaactggcttggggctcccctcttcatttccccagagggccttctccccatccatagccaggccacccccttccccagggatcccccactttcagcctcagccaggggaacacacaagtgcttttcaacaagtagttaattccctagcatggagtatcatctgtgggggctgcttacacaatggcagaggaattgcgctgtcctgcaggcagtcacagggggagaggggaagaaggcactctcagacattagagccagagccaactcagggtcacttctgtggcaggcctgaaagcaccaccaggatgtccaggccaggaggtcccatgggcatacccagatctgctgaaggaggcctctctgtctcttctctgtgtctcttcctctctctctccccagttataaccagaaggcaggtgcaatttctagaagagcccataaaccatttccatttattaaaagagaaagaaagagagagagcgagagagaggtgaggctggtggggagtgaggaggaggcacaaggaaggagtgcagaggggaggcaaggcaaggaaagaacacagggtggagggtggctgagtgggccctggtgcagccctcatccccaggggctggctcgggctccatgctgtgcgcacagcctccaaccaccatcaggaggctacaggctccatccaggatgttgtctatgggactcctgtctctgaggcaccatggggtgtgttggggagagactgcactctggacagcctgtctgggttcaattcccagaccctctactcacaagctgtgtgaccttgggtatgatgcttaaccactctgtgcctgcatctcctcatctgaaaaccaggaccaagaagagtgcccaccacctggggttgcttgtgaggatggaaaacaggacctggcacaaggtgtctagcccatgcctcagagcttgcacccaacagagcaagtaacaaggtcaaggcaacaacagagggtggacctgaaacacatcctcaagaatccagcaatttcctcaataagttaaacacagcattaccataggatctagcaatcccattcctaggcatataccccaaatcaaacacaggcctggcacagtggttcatgcctgtaatcccagtactttgggaggccgaggcaggcagatcacctgaggtcaggagtttgagaccagcctggccaacatggtgaaaccctgtctctactaaaaatacaaaaaattagccgggtgtgatggcggatacctgtaatcccagcaactcgggaggctgaggcaggagaatcgcttgaaccaggaggcagaggttgcagtgagctgagattgtgtcactgcactccagcctgggtgacagagtgagagcccatctcaaaaaaaaaaaaaaagaaaagaaaagataccaacaaaagctcgtacacaagtgttcatagcagcactattcacaatagccaaaggcggaaacaacacagatgtccatcaactgatgtatgaataagaaaaatgtggtgtggccatgcacagaactaaaggaacggagtactgctgcatgccacaacacaggtgaacctcaagaacattatgctaagtggaagaagccggacacaaaaggccacatatcctatcattctactcataggaaatatccaaataggcctcaagaagcagcaagcagatcacaggttctcaggctggatggaggagagaacggcagtgactccccattggtccagggtttccatctgcagtgctggacggttctggaagtaagtagcacagatggttgaacagaattctggttgtatacttaaaatctcacaatggtcaattttatagtgtgtatattttaccataataataaaaaaaaagaattcagaaagggcacagcactcagactcttctcccctgagtcctctcacgtggtgaagagccaggcaaaagggttgagggcattgttgttatgcactaagttcccccactgtgttcctgccctcccctctttttccccctgcaccactctgcctgtggtttcccagctcacctctgggcctttcctgtgctattccctctgccaggagtgcagcccctgccaccccagcaccctcccacctcagccagcctagctcctctcagcccttcaaacccagctcagcccctgcctgctgtagaaggctttcccttgttaagatctcctcctcagggctcccacctcactccccggcacctaccctttgtcaaagcaccatgttctgtgcatgctagacagagctccccacctcagctgtaagcttcttccatgcaagggccagatctaatttactcttatacccttagagccgagcacagagaaattatataaataacaaatgagttaaaactacagactattatctagaagtcatgagataggaaagaaaaattagttatgaagaagggactctcaattcctagataacttaaccccattctcacccctgatcccagaacctctccagggaaaagaatgaggacaccccaagcagagagtgaccaggccaaccaagagcccccacgtgggcctttgtcaggaaagtcaggggctgaagaaccatgacatcctaatcccagtttggagtggacagcctggccttggattcagtctccgctactttcttcaagggagccaagtactaggctctccccacctcttacctcattcaaacctgcagaggtaaaagccaccttatagaggaggaaattgagactccgggaggtcaggcgcatgccccgacaacaaagctaataatgttcaacaccacaggcatctgaggccaaaacttgtgacttttaaattcgtttcctcttcctccagcagtgtctacatggttgcctcctcaatcttctaactaacacgagaaggccagagacacaggcaatgctaaaggacagatccttgtggtgctggactaacccaccgaatgcagctgggtcctgttccaaaaactcacttcaaacaatgatgctattgaccaggatagacagagggacaaggaaagagagatccttggggaaagacacaaaatgattcatctcagccactgtgctcaactacttgtgtggctttgagtaagtccaggtctctctggggctttttaatttttcccttttgtaaaaaaattgtctaagtctaacataaaatgcagtaaatcatctccaaagtctcttctagctcttaggttctaacactattacaactaacagcttccccagaaggatctagaaaaagtggccatcttgtccacattcacttagtgcaagtcacgcctagagcagacagcgttgcctgtgagggtgatgcagtgcacaaagctaagtcaccatcaccttttctctgggagcttcttataccaatgccccaaacattccttgtaccaggacagacacaaagagaaagatgcatttattctgctcccaccacatgttctataggagacctgtagtgtaggtctcagtagtactccaaattctgtcattctctcccatcttcctgatttctgccccgcctgcctgcctgcactaatattcagtgcatattatccttgaaatcaacttgaaattgtctcgattttttcaaattagcattgtcctgggcaataatatctgtgaaatcacgagctctgatgtactagttctatttttccacaagtgtattcaaatacacaactataataagaaattcgtctgtgtccctcctcaaagcatcttgcatcccaccagcattgaggtgtggcaaaacacagcagtagctcacttagtctccaccagcaaacctcttaggccaaacaaagctgtttcctaccattttagaaaaaccgagacttggggaagcaagcgttcaaggtgacgcagccagaaagcaccacgcggggcttcaaacttgggtgtgcctgattctaagtcccaagtctttgccgctcttgtaagcatccagcttgtctacagcagatgggggtgaatgaaagtcaagagattgtaaataatgccaatgacctttatcacctattctacttaatcctgtcctaagaacttgacagcaagattttccacgataatctgaaatgagagtaattcatctatgcataaacaaagctgacagccagcatactgaaatggacagaaggagagcactgtatgagtccagaccagttagctccctgggcaggtgcccctcacccacgccagcaaggtcaaggtttattcccactccaggcaacgctgggttcaagctgtcccagttcagaggctgtaccaccgaccctgccagcgctcctgcaaatgcacagcttagtcacaagggactccggctgtgcatgtgcgtgactcagcacacatccctcagccctccaaggaaaacaatgacaagagcacatgggatcagcagtgtcatccgtgaacacagaaacacccggcccttcatgcataaacccaccaaagaaaagggcttccaacctagcctggaaaattcaagaactggaagggctggtgctcaaagtcatctggtctgacccctcacaagacagcaaggaaaaaccagagccaagaaagaggcaacaagggacttgcccacgggcactcagctgtgtcagtccagggctaaaaggaagtgcccctacagcttcctgcagagtcagcagccccaggcacagtacttctctctgcccacgtggcactgaggaaattgccaattacagagctatgccctaaattcaggaatcaataaagtgtaagtggagagcccagttacccatatgaattcaacaacaacaaagaaaaatgaagaggaaaactacccagctcattatctctctgaagtgttttccagtaacaactcaatacgaatcagaaataatctcctacgagaagcagcaactggggggaaaatgcactgaactgtgcttggagaaagaaggggctggccatgcattccagcacgatgagaatccccccgtgtgtcacgcaatatgccaactgcaggaggatcccccaagcaggcgtgtgctaacacgtcatttgactccaacacgagatgactttgagttcccaatgatgtgcgcaaaagggacagattctccccgccagtacagtgggctctctggaccttctgaccaagccaggaagggaagaggttggcagcagatgagggactgaccagcgaatgaaaacacagcgatgccagatgcaaaggacactccttgggtgggaaggaggtagggttggtttattttttcccagactttttcactcatttaagcctggagaatacctccctccaaattttatccaagaaccagccaatggccaaaccccactcaaaagagaaaacatgaacactaaaatattccatgtactgaatatttttaaagcaaagttaggattttctaggtttgtttccatgggggaagagggtggtaattaaatgatttacagaagaattttacaacctcttcattttacagataaagcaagcaagacataaagaagcaaatggttttttcaaagtaaccctgatagtcaatagcagaaccaaaaccagaatgcaagtgaaaaaatccagatttgccaaaaccttcctattggctctatgagagactaacttctgagtccgggctatcctgatgatactgacagggtccccaaaagctatcatgcctctctgagtatgttctcttggcaacctgaaatcactctcttccttagctcctctaccatctgtaattaattattctataacttttattgaagactttctcccctgcaatagtagaagctctactattatgctgggaacataataaatgtttgaaaatatttgtagagtgaatgcatatgtatttctgacatatgaacactcgtgcattcaacaaaccagggctgaccatccagggcatgacagtgctttcatccctcagtgttgctaacatgcccagtgttgagacaccccaacaaggtcatactacacatgcaggggattcaacaaggtcagacacaaccagagccccaaggagcagagtctactgggcagactagccaacacacagaagcggctgcatgacacaggagaaagggcacccgtgaagctggagctccgggtctagtttcccttccctagtcaatgattacatgacttaggacaaatcatttaacttctctagaacttgtctgcttcatttgcaaacacaagccaaacaagaggaaggcaggcatcccgggaggaggaacagtaaatgttggaagtaaaagccctaaggatcctaatctccttgagtacagggaccagtctttcttcccgcatcccaccactcttccccagatttgtgtgccaggctctgcccctcccccacctccatcactgcccggcaagagtcaccaaactctgacagcattattcttccagccactgacctccaaatatccctctgataaaatcaaatcctaacaaaggaggatgaactccccctgcttaggctttgtgggagagaactgcctgttgctcattggtaactcagggcagaaatatcagaaggatgaactgtggggaggctataaatgtgtgactgttccttaccacctcatggccacctgtactgtctctatagagccaaagctctaaaaggtactcatttgtcttagctccatgcctgaatgttctactcctgattacagagggagaacccttccctctcttgctccatctatgccaaagctggcccactatgctgcttggtgctggcctctaggccagcagcccctgccaagggcacacttgagccaggcagccaggtaactccaggccaggcttccccctcagggcgttaccaggctcctccccagcttctccctagcctggcaaacatccagccctatgctcatcccagaaacctaaagataaaatcattaggaaaacttctagctcagagatgattattgctatgttatttataatagccaaacagcagaaacagcctaaatatcctacactagagaaattatggtgcagccataccaagtagaatgtagtcataaaaagggtttacataggagatgtttgttatagtaactgggaggcagaaggcagcatacaaaattggcagagggtacagtcagagctaaagaagttgaaataatttaaaaaattggtacaagcaggcttaaagaaaatgcatcaaacgataaccaactggtgtcctaggaagaaactagatacgaggtcctttctctatccacgtttatgtgtatttattatagcgaagcataaacattaccactgaaaagcatctcatttttcctgaaggaacctaatatactcaggaagatcagggatttgggcatcaaaagttctgggttcaaggtccaggtctatctatacaataggcacaaaaatacaggtagatggaaggaataagatctagtgttcagtagcacaacagaacgactacagttaataataatttactctacatttcaaaatagctaaaagaaaatatttgagatgttcccaaaacaaagaagtgacaaacgtttgatcaatgttctttctgtttccagcctacaatctatacctacaacccacagcctacaacccatacctaccatttacagctataacctacagcatataactacaaactaaaacctacaccctgtacctccaacttataccctgcaacctacaactgcaatctataccatatatacctacaacctataacccataatctacaacctatatctacaaccacacctacaaactacagggatgctataagggtcgtggagattcaccaagtgccaatctttacatgaatatgttatatgaaggtggcgcatgaattataatttcttaaattctacacacatgcacacactccagtagcaaccacacatcagttactaagcacatcttaattccagaaggacgctctaacatcccaaaatactccaaccagggctcaaaagtcaaaaggtcccaccattgactcctgttcatctaccccacatatctcaggactcatcagatttggtccaagaagtttattcccctccttccgaaaaatacggatggaagtagttataattcagttttttaaaagacagctattatcaaaaagtctgaaaataacaaatgctggcaaggaagtggagaacagggaacattcatacactgttggtgggaatgtaaattggtacagccactatggaaaacagtatgaaggttcctcaaaaaactaaaaatagaattaccatatgatccagcaattccactgctgggtatatacccaaaagaaaagcaatcacacagaagagatctcttcactcctgtatttattgcagcactcttcacaatagccaagatacggaatcaacctgagtgtccatcaatgaacaaatggataaagaaaatgtggtacatatacacaatgaaatgttattcagccatacaaaagaatggaattctgtcctttgcagtaacatggatggaacaggaggacattatgttaagtgaaataagccaggcacagaaagacaaatatgacatgtccttactcatgtggaagctaaaaaactatctcatggagcaagagagtagaatggtagttaccagaagctgggaagggtagtggggaggggatattaagagggattggttgataggtgcaaacatacaggtagatagaaggaatacgatctagtgttcagtagcacaacagggcaactgtagttaacaagaatttattctacatttcaaaatagctagaagagaatatgtgggatgctcccaatacaaagaaatgataaatgtttgaggtgatggtatcccaggtgcccagagttgatcattacacattgtgtgctcacagcaaactatcacaggggcctcataaatacataaaactattatgtatccataaaaattaagacaaagaaaggaaaatgcactggcatgtgtattttgcggaattatttggtttggcaactactctttgtctagagatggagtttagaattgtccctcaggtttgaggccacagttcctggcatctcggagcaggaggacgccagcatccttcttgttagaatcagacagcatgggctttcccagagcttacttcctgctgtggtctttcttcccagtgttgggagaattccctcacttcactgatcttcaatatcctcattagtgacagtaatgccaatatttttatcatttagaatgtgctagatacaaagctaagggcttcatacctacgaactcatctattctgtgcaacagccttactatgaaaataacattaggtacgttgactgcctcccccaggtagagatgaggaagtagaggcacaaagaggtgagtaacttactcaggttcccacagcttgtgggcaggatgttggggttggaattgggtactctgtctcccgcactctgatatgtctgtcagctggaagcaaaaaggcccacttcagaagtcattgactaaattttaaaagccaatgatctaaacaccatagtgcaccctcaattggtgtcatcactggtctcctccccagagctgccaacatccacacctttctctcaacagccatttgaacacagggagaacacatgattcaccacagccaatgactgggaaaaaccaaacacaaagctcaccgcatggagtgtgatgtcttgtgtcccattcatttcccagtgatttgcaggaccttgtatggtgtctgggaaaaatgtgtattgactttagttcatttccttcgtaggttcagcctcttattattttatgttcatatttattttccagagatagccctaaacacgggacatcaccagttccagtgaaatctccagggggagtacatagagccccaggacagacaggaactgtgtcacctaacccaacactcccaagacttctgaatgctcctagaaccaaactcctcttctgctccattgcttcccctccacccccctgctcctttaatttcagtgacaggaaatgccttccgtttggtccatcctatgtcatgcatcactgtgccaactcaggggacacattcttcagccacaagaacaccaccccagcagaaccacattgagcctacagtgcccacaccttgctccaaaagtcacatccttgcccccacccagggcccaccttccccaaaccatggacaaatgccagaaccaggcctgagaagggctctttcagagtccaagacacatgagcttccttggaaagcatcttccctatggaaattccccccatgactgcagaaaaattaaaatcactcagaattctctatttcttcttagagtttcagaattgacttgaagacacctaaaatcctaatctcaccaactctccatctcctcctctgcctctaaaggaagaaaaaaaaattttaaagaatggacctagcattgagaaacagagaacaatctattattgtgactataacaactcctaaggagccatcagagtctcggtggcaccgctggccccatcgtcacccaaatcatcacagtgggccgttcggactgcaacacgctgcctgctcctcccggcgcacattcttcctggctctccctcactgattttttggcagggctcagcaggaatggaatgggcttccacgcccgttatgatgatggatgggcaggctgctggtggagtggggcctttggggaggcactgtatacacacgcacatacacacacactcacatactctcacattcgtatactctacacgtactctcacacacactctcatattcacatactctacacacacactcacacacatccacatactctcacattcacatactctacacacactcacacacacccacatactctacattcacatacacactctacacatactctaaacacacacacatacactagacacactcatactcacacatactctcatattcacatactctacacactcacaaacacacatatactgtcacactcacatactctacactcacactgcatacatgtgctataccctacaccctacacatacccatacacactcacactcaaactcttggccagcagcacccaggtgaatccactgtggtctcgtgggccaggattctccccaagatccttggtcgctgaagcagccccaaacccgctttgtctgggtctcttccaactctagagctttcattgccatcattacccccagctggacttctgagtcaaccagatctgagttagaatcccagctccacagcttactagctgtgtggccttggcaaggtcacctctctgaacctcaatttcttcacgtgtgtcttggagaatgccagtactaaactcccaggctaatatggagtcctcaacagcccagctagatggtgagtcccatctatgatccatcaatggcaccccctcccccaccttggtccctctgccacagactccatggatctccttaaaacctaaggatatggagttaaaatctgacccaacagagggcctctatgaacctgttctcgtgccacaaaaggcatctaatcccattgctccctgcctgtgaagggctggttgtcaagactgattcaggggacagtgtgtgtggagtggttagcacagggctcagcatgaaggctctgcatagtaacagctgcctctgaggctaggaggctccgtacataggtcccccctcctgctgagcagtaacctgtctccttcatgtcaccacccacggtcctacatctacccaagaggctgaacacactccaatacaggctggttggtccgggaggaccctagggaagaagctggagactctgagacttacaccattcataaaccagctcccccaccctaggtaagagcatatgtctctgaggaacccacttttctcttttctgttccctcaagagcctgcaaggccattctcttatttgccattcccaacttcccaatgagctagcatgataggtactaacgttctgcattttaaagacaagcaagcacctaagtcaggttgcttgtccaagataatgcagagatggagatgggatcaaaacctatgagtcatctcccaacaacgtatccactaaaatacctgcaattctagttttacaggtaagagaatagacatgggtgggataagtgagtggcctggggatacccagataatggagcatggaggtgaggcagaattgagcttggggaccgaaactctatcctcttaaatggcagatttgggagacattccctcaagaatgaacccagctctggcagggcccctcatccccaggtgtccccaccaaattcctggcccctgctattttggaagtctatcagagatgggcaacacagacactgaggagccacgggtgaattcccagccctaattttctgttctgtgctcagtctgtgggccctgggcttgggtatcgccctctctctgcagagtgtgtgcaccacccaccaatgcaaatgctgttggccgctgggagaaagcaaagcaaaacttgctgccagcccagctctgcttcgtaatctgccctttgcattgctggggaagcagtgggaatacagttgcagctacctgatggtacatctaaaaaaataaccagctaaaggggcccacagactcccacctgtcctctcctacccaccactctgggagagcagcgaagagctgctgtttcttttttctcccaccccaaggaaatcaatatgttgtgcaaaaacaactccttccagcaaaactccactttacacctacctccatctggaccatcccttggagcatccccctaattcaccaataattcctcccagaatcatcatgattgatttcacagacctgggttgctgcctgtcctgctatgtcccagccaggtggagcagagcagtcacatccacactcagtccccaaaagctttggatccagggtcacagccaaagagacacatgcctagaactggcttgcagagcaataaggcaaagctggggtgttttaaaagggaagtccaggttggtatccatataaaggctaacagtgattgagcacctactgtgggctaagcactctgcagaacttacctcattgaataatcagtataacattttacaaatgagcaaactcctttgggaaaaactggcactgttcagactataatttgttcatataactttcacaatgttcatcttcttgataccatacttatggataaaaataatacttagtggctctttgggtaaaaatggtaatattaattgtagtgctggcagtagtaagactagcactagcaattggaatttattatgcattttaatgactgtcaggcattgtgctgaatattttgaatacattatttgagtaaaaatactgttatcactttcaatgttcccagaattatgaaaatgtatctcaaaaatttaagagtaatcactaggagaaggctgggcatggtggctcatgcctgtaatcccagcacttcgggaggccgaggtgggctgatcccctgaggtcaggagttggagaccagcctggtcaacagggcgaaaccccaactctactaaaaatacacaaaaaaaatagctgagtgtggtggtgcacgcctgtaatcccaactactcaggaggctgaggcaggagaatcgcttgaacccaggaggcagagatcgcagtgagccaagatcgcaccactgcactccagcttgggcaatagagcaagacttcctctcaaaaaaaaaaagagtaatcactaggagaacagaatatgatctacagcttatgaaccaacaaaatttaaaaaaagaagaaatatggaacaattcctttaatataagacaggaaagggggaaagaggagcaaagaaacccaaaataaaacagcagaaaaaactcacatattgtatcagtgagtatattaagtataaacgaattaaacgtacctattaaaagacagagattatcaaaccagatgaaaacattaaacaaaattcaattatttgatgattgtaagaaacatatagaaaagccttattaaaagattgacaataaaaagacaaaaaataatatgtcagaaaaactctacccacaagaaaactagtgtaacatgtaattaatatgatatgaaactaattttgttcctcaaaacaatgcaaggtagaattaaaatccctattttgcatgagactgtgaaatagagaagttaggttacttgttcaagctcacacaagcagcaggggcagaaaaaggacccacacttggatttctattactccaaagcccattcttgaaactacgtgactctattgttctaagtaacattaccttagaaactattcagtgtgtagaaagtacatgttccaaaatcaaggcttgagataggagtaaggaaaatggagaatggatcatgagtcactaaaaaaataagaaagaacaatctactggttctcagtcttggaagcacgctagatagaacacctagggaactcaaagaaaaggccagtgatttggccctaccctagaccaattaactccacatgcctaggggtgaggcccaggcatcaatattttaaaagcttccaaagtgattttaatgtgcagccagagttgagaacaacttatccattcactaactcaagggcaagtttgctaaaacatggagggtatctttaggtcattgtgacaaagagaaatgagaagatcctccaaccttatccctttgcaatggtttgaatatttgtgtccctccccaaaaatttatatgtagcaattttaacccttataagtgggattactgctctataaaagaggtcccagagagctgcctggtcccttccatcatgtgaggacacagaaggctccatgtatgaagcaggaagtgggctcttaccaaaaaccacaagcaccttgatcttggacttcccatcctccagaattgtgagaaataaatttctactgtttgcaaatcacccagtgcaaggcatttttattatatcaacccaaatggaccaagacaaaaggaagaattggcataaagagagacataagcccttcttctgcatagtgagaggatgccatgcctgagaatatgacagaatccctgtgctaacaccccctccctgtttcttaaagagaacacaatgaaccacagaatctcagcactggaaagaatcttaggggaaacttaaaatggatcccagacttggctgattgttagaacgccttggaagttttataaaaatataaatttctgtggccctcccctaagggaatctaattctatagctctgtgttgagcctaggaaattgtatttttttaaaagatacgcagggaggcttttggagaaagatggcagagtgtcccaatacataatcagacaaagcaaaacaaaaaaacaaaaaccaataagtgaaggagaaaagcaagcagcaatcaaacaaggaactggcacacactcatactatcaacatctaaaagacctggggtgagggtgggggcaggaacaggatttggcagaagttgtcaggttcctaaccccaccccatgcttcagaagtattattgctgaggccaaaatctttagacttctcactaattactatatatttgcagagaagcagactgtgagtgtgacatcatttcttcctcttttctgacttaatacggagagagttggggaaacagattgagaactattagaaaaagagctataaaacagcagcatgaacaatcaagactctctctctttctctctctctcattctctctctctttctctctctctcattctctctctctttctctcacagaaacacaggttccagggctcaacgcttaattgaggggatcatctaaatggcaaggacatcccctcctatatcccctcattagtggaatgagccctggaacagcacatttaacaaagtcatgcaagagttaaatgtggtcctacccaaaggagcacacagctctgagtctgaccaccctcatctcccatgttcccctataatgctcccaggcatcagaaagcatctcaaactggagctgacaccatggcagaggtttcaggtaagtcacaaaaggagtcctaaagaatttgccctcaatatcagagtgattagaagaagtggacagagctacccaagttaaacatatgcaagataaaaaaaatatggcacttgtgaacacacactacaggaggaaaataaggaacataatagcatattgtgctattatgatgatgaagaacctctctagaagaaaacataaccaaagaaacaaagaaaattcctgcaaatgtttaatgctatagaagaaattaacaaaaacatatattcaatgaattcagaaaagttagcaggtcaaagaaaacaaatcaaagaccaaaataatcccattttagattgtcgagtaaactagaacagaaagaatacaactggaaattgaattcctacgtaggggacatgcttgagactaaacaactcagggacttgttagatattatcagccttaacaatgtaaaaataagctataattaaaataagaaagggggtaggaggtaggaagaagcaggtgattgctaattttttcatcatttataacatgggctcaaaagtctaaaattgaaactaggtattaacagaaagcaatgactccatcttcttaaaatttttcataaccttgatgagctcttctaaaagatatccatttcaatgaagacatatttttccagaactcagaacttcctttagatgtacttgtttcctcttagaaatttaagccatgtacgttaatactctttgttaaaattgggatgtagagtgtgatcccattattctaaaattattcctgtcaatctgtgatctacatatctttccagctgtgtgtgtgtgtgtgtgtgtgtgtgtgtgtgtgtgtgtgatgatagagagattacgtgagttttcttaatgttcatgatggttatgtctaggaagtgagatttttgagtaatttttaaatttcttctctgaactttgatattttcaaaaacaattgttataattgtttaaaggaaaaaattcccaagtggttgagagggtcacagctaaacttgaagagcacggcatctagcccaggaatctgattcctgaatctccaaaaatcactcctgagaagaagccacacaccaagctgctgtcaaaatctccagtgatgatgaagcactcactatcctcatatgccccatcccactgcagggcaacttcaattttacaggaccacaaattttctttctactgctaccctatcttctagtaataatatccacctttcactgaatttccctaactgtgagctaagcgtattctttaaatcttcagagcaactctatgaaggtatgaggtttcactatagttttgcccgtcttcctgttgaagagactgaagcccagagaagtaaattttcctgaggtcccccagctagtagtttgcagagctgggcttcagcttttcattgtggttgaatacaaagcctgtgtttttaaccaaaattctttgctagaaagtattgcatcatattgaccccaaatccacttttctataacttctaaccaatggcactgactctgctccctggggacacagcaaaaagtctaatccccttccataagcattgtcttccaacataggaagacaaaaatcatgtgaccctcatctaccccatcttcttcctccccaagtgatccttctgcaggtgcaaaatgtaccgagaagagagcatattttttctgacccacgatgaagtcactgaatgattagtttaaatggaatcatgaagtttctaatatgtacttaactatatgctatcatttaagttctgctttgaaggagttcctaatagttgggttcctccggaaaatctcctaagagggtttcatcccacagacaactcccaactccctgggttaactggaggggtgcagtggtgtggataaagtaatttatgtctgacacggaaatgtattatatgcatttttcaatttatcttcctaattaaattttttcatagactcatatttaaatgagtttccactcccctaacacatgaggactgacagtgagtggagggaaaataggataaaaatgttaagtagattttccaccaagtgtgaatcctccacacacgaatcactgagggaatcgctggcactctgtgggctgggtggaggggttttctttggtttataaactccccagaacctgattttcacatgcagacatgagagcctgtccagccagcagagtatatactgtccagcatctcctgtgccaggagccacaaggcagtggggcatggaggtgccccccgggccctgcctggaacatattctcccaggactttgagcttcctggcagggtcatgttccaggagccccgatttcagggaaatattctgctcccttggtttcacacagagggtagcaagcctccaccaaaatgcacacctgtgttggcagcgaggctgtggactgtggcctggaaaacatggcctcacgcctgggaaagcatgcctcagcgtaggaacagagacccaatatagctcagctcggactgagtcaggcactgaccccactaccctgtccctaaatcccccctgcagtgtccttgatgtcacctccctgatgtcctgaaatccaagccccccagccccctggggcacaggcacggctcttcactccctccctatggccattccccagttaccatctgaactcacttattccaggcccaggcctggctgtcccttggagggaaggagagacacccaacaccacagcccagaaggaacctccacagggagtcagtcaaaagccagacactaaaattacattttctcactcccttctcatttggaggaaagtctgtgtggggctggctgtgatcacacactttcatcacacactttctgcataagtgagagaactgtctcaactgcctcctcctcttcctcctcatcctcctcctattccctctccctcctccactgaattcccagctcactgcctcccactagttcacagtgtgctagggccctccagccccaccgagaagccacaggaagctctgatccacccccacagggaaaaagggatcagaaccaccacccagcacagatataggggccttgtgtaggggaccagccagggagcccctccatcttgaagaatctaagtcacgaggacaagcacaggagcaaagcaggcagcctgagctatccatgtcccaggccactgccggcctgttctgaaaaatttcacacaaggttatccccaatattcccagacatgtgtcccttccccggtgctgcatggcccccacactggctgagtatctccagtgggagaggaaaggacagaccgactcttaggaatgcctgctcactccgtggtagcatgtccccttcaggcctcctttcccatctttgaaagtgaatcctgggtggctccctgtcaggggagcacacagataacccagccccaaagatggcggggcagacctgggcattagcaactggagttctgttttcccttctaggctacctactatgtgtcgggctctgtgcttggtgctttgtaaacccactctcattccatcacccagcaacagtgagacccaaagctcagagaagtcaaagactttgcctgaggatcttacctacaattaatggcacatggtcaagacacaaatctcattccagaaaccaagatctttctaccacaccaaatgtttccctaaagagagcccataactccacacaggaacccagcccagcctggataacccatcagaacagaggaagaaaactcctctgtcaaaatgaaagatgctaatagcaagggtgtttactaggagtgttcaaatttccattaaaaccttcctgtgcaaagatgagctacgaaaatttccttcttggaagcttgtacctcctggaatccagacatctactttcaagctgctgaaggctcccactgcctccccacagggctgcaatcccgaccatggattattaaggagtccacaggcttggctcaatgaacagaacggctccgttatatttcaacctacccactaagacttaaatatcacaccctagttcagacagccctcgcctttcatttttcttggctttaggaagacagggagggagggcatacagagccaagaacccaagtgtctgagcttttacagtaacccaaactcacccaagacaggctgcccaaccgggcccacctctgtgtggcttctccagatcaacagaaatttggggtgaaagcctgcttttctccatgcagtaaggcatctgcatgaaaggcacatgtttccaggaccttccaagctctttcttgagtaaatattctcttaaaaaggttttgaagcagaggctaaggagaggagtcaacatggaattttatttctcttggattatctgactcaagcagcacccaagactagcaagaccaaagatgggctgacccaaagataaccatttacaacaggagtcagcaaaccaacagcctaagggcccaatccagcccgatgcctatttttataaataaagttttattggcacacagccatgctcatctgttctggggtgtctgtggctgatttcatgctacaaaggcatagttgagtggctgcaacagcatggcccagaaaagcctaaaatctctattatctggccttttacaaattaaaaaaaaaaaattgccaacccttgatttagaaaaactttcagatgtagttaggcctatttcttgagcctttttaagagcaaataatatctctggaatatatttggtatagtcttatatggagggaaaaggatgaaaaaaaatggcccctgagtttccttccaaatccacaggaagccaaaaaaggaatgaggtgcctggtacaaatgcctcaggtgacagacatcctatttacagaaaggcaatctgtgcaccacctcagggaggccaaaccaacatgcctggtgcaatcatgcagccttaccctgcaaccacgcccaacacttggaagcctaacgtggacaacgcctggtgcaagagggcatgtggtcagatgttccacccccacttagctcaggggcagacagaaggcttctccaaagctgtcccttggcaggatttcatgtagcagatgccactagtctacagtctctacagcctctgactcccagcatgtacacatgtaggtgtgcacagaggcccagagaagcagggtcaatggaatccatgaagctgacctggtggcagctcagggtttattccctgcttccaacctaccagcaggcacaactcttgatagatctaacagcacactggggatggagcactgcatcaggactgaggagactcagggtcttgccccagctctgtggctaactcctgatgcaaccttagaagagtcatatcatgtctctgggactcactttcttcttctgtcaaatggattaatactacccactccatctaactcacagagctcagtcatgcaacaagtaattattgggcatctactatgagtcagacattatgctaagcacttgggatatagtggcaatcaagatggacaaattccctgccttgtggagcttacactctggggttggtatggaaactaataagggatgcatagatgaatactttgaaaaatcatgatgtgcttcacttgagtcgtggatggtgatgctatcttcccactctgggccattcatggactagactcacacactgagcagacctgctgggaacacatcactgataaaagtcattcattgggaactattctaaatgccttgtatgtattaacctcaccatcacagagagtcctcaacactgaagtaggaactctaaatatgcatactccacaaacaaggaagctgaggcctggagcactggagctaaaaaggaaatatgtgtcctgtcccttatgatatctcccatactggctggagatgttgaatttactatattaaattcttctccattatcttgaggagtaaggccaggacccttcagatggagaggaagtctctctccctagatggggaagggaagttctccttccctagttcaatcatcacagaaaaggaaagcatctaacaggaaagtagcacccagaagagaggccttaaactccttggaagaggtgatcctcctatctgcctctttgggctgaactctcctagcaggggatttttagaagggtggataaccagttgtgggctgcagtgagaagagcgaacccagcccatgaagaaggccaaaaaaatgaggactctggcagggtctgtgagctaagatgagctatgccctacagggcagttatctagctctgtcagcctccattcatttccttttttctgtctccacattttcagtaacgtcctgtctaaacatcccaccagactctcaacgcaacatagacaattagcgaaaggttagaaagtcatgcacccaagcttggcccaccacagttagaggaaaatggcaccaccttaaaactagtatgtaggtgttcgtactaaatacgtgagaaattctcccaaaggaaggtgaagctggagagagtcagggtcatccaactactttttgccctctcagagcattttcctccttgccaatgctggacaatgaaagcactagtttattcagggaaatcacagtttcctttttagaagagcaggatgctaagaagggagcaagaataagttgaaaacaaatggagtaagattcagcattgtgcacgcacccccagcccagccacccaagagattctcccaagccaggcagtgatgctcacatctggtccttcaccaccaggaccaagtcagagcaaaggagaaaagaagagaaggaagagacaggagcgcactggatgggagagtgaagggttggagaagagagggatcccagcctactcccaagcccagtgggatcatcttcccctaggaactcccatctgatattggctctggttggggctgcctctctcccagcacctgctgggtagacttccccatgtttggtcctgggaggtgctgtagcagctggagctgtcctctttctgccgctggaagcaactggaagtcccaggggccctggcgctccctctgggatttcaccctattctttcctgtctcgctttctcttttatctcctggattaacttactgttgtgccatctacccagttgtcagtgtgcctgtctcagctttgtgatctcacgtagatccacagaacctaagagctggaacgggccctgaaaacattctggagcaggcgtctcggcagactcaggcatgcctctccccagggaaccaggccgcgtctgggcagaagcaaggcttgggggagtggcaaggattgtgtgtactccctcgaagcacatcttcagaagtggagcattttcaaggtaggatgttgacataattgttaggtccatgaaggcagatgctagaagcagtgtgaaaataagactctgaggttgtccaggtggggggctatttttatacatttccccccacaacccaagcagtacatgggccctagccctcaagcttcacctcccagatgtaagactccaaccaagattttggagtcaggggcatacaaagcccactcaggggacacactcatagagtattcaactgattcagagatgtgggaagaacgctattcctatttatttttttgtagaaacagggtcttgctatgttgcccaggttgctctcaaactcctaggctcaagtgatcctcccacctcatcctcccgagtagctggaactacaggaacacgccaccacacccagctaccactatttttatattaaataaaacatgtatcatggagtgacaggaaaaacctatgcaagtttaagtaaatattgtacttaaagtgggtgactttaaattatgctcttatatgtacaggggaaggacagaggaagggctcatttaccttcattcttctctctccctagagaattctgtgtatccaattttaaaaattcatcatatgtcacagacagaggcacagaccccctgagccatggtgggaagatacttctggacaaatgtatacccagcaaaaatctcaaaagctccaactttctaatggcttcattttactgatgagaaaactcagacctatagaaagaagagcagaaacagactggatcccaaatccctgtgccccacagttgatgctctttccacctccaatctgaggcactgctctccatgtggccaggaaccgtttccaactaaactggtcctgcctagggcctggaaaaacacactgttaatatgcagccttaattaaatatttctgatgagcacaatgatgcttcaaaattctagctaggattcgactgatgctgcagcctggagccatcaaggaagagcctctttcccctaagcatggtgtgtgtggagcttgctgggaagactgagaccttccaatccaacctggccagcacatctattcaagccatcaaccagaggacagatgtagaagtcaccttctccttccagggaccactcttggaagcagatttccacaaaggggaccgtacagttctaagcttacagatggttagaacagaccagccccactggaaggccagaagtgacgaggatgaggtcaaatgtcagtgacagagaggctcagacctctctgagccatggtgggaaaaatctctctgacccatggtgggaaaaatctccctgaactaatctgcaatttccaggcatttctgaccagtaaggaaaggatttggttgcagaaggctgggaagctagattgtagaccaagagatggagaaaactcttcaaggggagagcccagccactacaaaggggcccagcatgaggtgtgctggaggtaccctgagggccgtggctgcctgactgacttatcctctactttgggaaaaggcaactcagtgcctggattaaaccattagctctggaggatgcctgtctggtttgaatcttaatttctccatttcccagctgtgtgacctcgataagattacttcatcctctgggtctgcttcctcatatgaaaacaggaacaagaagtgcataaacacatttcagggatgtagggaagactaaaagggttaatatagggcaagcacttagcacagtgcccagcatagagcagtactgtctaggctgtagctaccacacatacccagtgaaggcactcaactaccaggtggacaagcaactgatacatgtgtgtgctgctctctgctcccctttggacatttggaatttcaagtactgggacttaataccacagagggcagagttttgtttttcctgcctttgacatgatgtttatgatcttcttttcttgtgaacaccccagacctagggaccagcggtggcctggcttcctgatgcagcccatgaacacatttaagaatccaaaaaggttagccaggcgcagtggctcacgcctgtaatctcagcactttgggaggctgaggcaggccgatcacttgaggccaggagttgaagaccagcctggccaacatggtgaaaccctgtctccactaaaaatacaaaaattagccaggcatggtggtgcacacctgtagtcccagctactggggaggctggggcatgagaatcgcttgaacccaggaggtggaggttgcagtgagctgagattgcaccactgtaccccagagcaagaccctgtctcaaaaaaacaaaaaacaaaacaaaacaaaaaaacgccgggtggcggggtggggaggcggggagaaagctgcctctgcattgcaacttcccaaacagcacagacattaacattttagtgatgaaataacaaagctgatattctcagtatcattcctttattgagtgaaatcagaaatataactttttcttcttttttttcccccgtgggactccataaaactatttttgttgtaaatgttttaaaaggcagcctgtcaatatttcaaatgttcctgaattggagctcatggataaatgactcttcccccattggccaagtctcctctcctgctgcagcaaggaaaggggcacttgggagctgagaaggcaggaaccaggcgccgttgacactcctctagtgagatgaatgttccctccactgggtcagcagtgagcaccagcccaagaagtgccctcgcctccctcctgctgggcagtcaccaggcaaccctgcaggcagtgcaccaagctgttcctccataatgcacacccagtcagggcctgggcacctctagttactcagcagtgagcccacctgctatgtctcaggggcatcccacacccagaaagctgcttctacttcaagcctactcccaggggatgccccatcagggactagagggtcctgctgaacccaccccaggttcaaggtcagcagcaggctgtttcaccaggaaggccaggagctatgctcaaggtaaccaaaaggacagaaggccccacccaagtgtcatcttgcccctcctcccagcttccccattggctagtaaatgagtaaacagacatggttctaaaacctagaagagcatcagaactccctgtggatctgggttcaataacacagatttgatattccactcctggatattccagttttgtaggtcttgagcagggatcgactttttttttttttaaggttccaacagatgatactgtggctacgatgggcagctcagatgtaggccactggcaacacagagtggaaggagaagcccacagggttcctcactgggcgacacaagctcttcaaagcaagctgagtaaatctcttggtaacaagccaagccggactgcccacagctatgggcaggtctgctgtgtctttcgcctgctgaaagcccaggttgcagcacagggaacagcagagacaggatcaaaggctctctgaggacagtctgtggcaacaaagtagcagctcctctctgatgaggtaaggaagagtccaaagaaattacttttgggctgggtgtggtggctcacacctataatcccagcactttgggagaacaaggcaggcagctcacttgaggtcaggagttttaagaccagcctggccaacatggtaaaacctcctctctactaaaatacaaaaattagctgagcgtgctagtgtgcacctataatcccagctactcaggaggctaaggcaggagaatcacttgaacctgggacgcagaggttgcagtgagccgagattgcaccactgcactccagtctgggtgacaagagtaatactccatctcaaaaaaaaaaaaaaaaaaaaagaaagaaagaaaagaaaagaaagaaagagaaagagaaaacacttttgaaatttggaaatgaggaagactaaggaagagtccaaaagaaactttgcctctgcccaaggagcccacaaactttccaaggccttcctgttcctggaaacggtgccatctccaaagactcctccgcacatggaagagcctgatctctcgggcacagtcaaccattacggcccattttctcaaactaggccctcctgggggtcttagggaaagggggcaacattacacaaggcaggtgaaggggatagccaatcacagaggggtgcaggttggcattgacctcttcctaacttttctcataatatgaaagtgacttctcttctcagaagaaccgttcataatgaaattcgagctgcctcaatcttccttgatcatctcttcactcttaccacatacacacacgcacgcacaccacaggaaaacgcatcagatgaagaacttccccagtccagtgcagatttaagaaagaggacactgacatagggaggtgggctggggagctggggagggggcagacaaacaagggcatgtgactgatacacttcagggcgggagtcagacggccccctcacaggccagggtgacatgtgacaaagtcacaaggccctgtggtatttcttgaaacttgatttcagcccaagtcaaactccatggatcaagggtcatttctggctattataggatgagagtatccaggactgaagacctcatggggcagaaagaaaaaaaacagaaaggtagctcttggagaaataacctaaagattagaatcaaggaagagccaacctctcttctaacagggaaaaaaaatttactaaaatgacacttcagcatcacctattttttcaagcttgtctttctgaacagaacttgaaaacacagttgtaaaactgttttactagttcagccgacttagaaaaacaaaaagagcttctcacagctttaaacagagtcctgtgctgaagtgttccaacactccagccccactctggggttaagaatgacagatgatgcaatgtaaaaacatcattttccactggacacagagaacatggtacaatactttggaggttaaacagatgagaagggaacagtacagagacccaaacttagctcctccatgcctctagcacacacatatgcctcatggaaggcatctggagaggttagtgctagagaggccagaaatcttgtttctggttctgtgctggaattaactaggtaaaccctggatgaactgttacatctttgatcgtcactacctgagaattaacttagacaaacattgacactctataaagcagcaattgcaaaatgtgggttttcaaaagcactctgagttcttttcaaagaggatggcataagaatcgacacagctgacatatggtgtggacagagagaaatagcttgggcttggatttccggtcagttcccctttctgccagttaccatcagaggaaccatgggcaaattacccaatctctctgagcctgtgtcttcacctttaaaaatggtattatagttctcaaagtaattgcgaggaattaaaagtcaattcagggtcaggcgcggtggctcatgctgtaatcccagcactttgggaggccgaggcaggtggatcatttgagtttaggagttcgagaccagcctggccaacatggtgaaaccccatctctgctgaaaatacaaaaactagccaggcatagtagcatgtgcctgtaatcctagttactcgggaggctgaggcaggagaattgcttgagcctggtaggcagaggttgtggtaagccgagatcacaccactgcactccagcctggacaacagagtgggactatctcaaaaaaaaaaaaaaaaaaaaaaaagggaattctatgccctgtaaagtgcagtctatggaagtgatgatgatgaagaccaggatacagtacaataaggactctttatgctttcaaaaccgtgattatgctgcatctggtggaagccaggactctggaaatatggcccagacacacccagaactgaggatcaagatgagcgtggatccctgggtcatgagcatcccaaccaagtgcctgatgcccaactccagggaaccatcttccctccgcacacaatagtcattccatggtggtgcacacctgtgagtcaaaaacaccctaagaaaatgtaatccttggggcatttcctcagctccagcctccggcccatcaatcacaagcacaatcaaactgcaatgcctcaaaccaatctcctaggacccctgccagggcagagactgaaagtcactgaggcaatagagcatgtattatattgatgatcctctagctgcaagacctgattggtttgagactcccttggataatgctggcaattaattttggcaaaagagcaaaagatagatgtgacatccattgaacacagagctgcacaggagtcaggtttctggaaggtaggaagaatgcaaggaaattaactccagagtggtttgcagggaatgggggctccaggctcattatttcaatcttgaaagctgtcaatcactgtcaaaaggcagtttaatctcaccctgaagctttcaagaacactatgaatccaggcctacaattagcagtccaatgttgggctgatgagttatgggcattttccatctgggagggcacaagcttctcctatccagggcgtgccctgggcataaaggatgtgtggacaaatacaaacactccaccagccagaggtgacagaaataggcctataatatttgcccaactgggtttatgagacaagcatgtagttcaacactgtttatacagttcatgagagaatcttgggcagtgacagagaatgtaactctcatcctccttagggcttccagaaatgaacagaggatatatatatttttttaaaaagtggatcctccacattttctaaagtttttaagctctctggggcaggttaagaaattcagactgcccaggaagtgattttttttttttttttttttgcatggaatttcgttcttgtcacccaggctagagtggaatgcaatggcatgatctcagctcaatgcaacctccgcctcctgggttcaagcaattctgcctcagcctccctagtagccaggattacaggtgcccgccaccatacctggctaatttttgtatttttagtagagacagggtttcaccatgttagccaggctagtcttgaactcctgacctcaggtgatctgccggcctcgggctcccctctttacaccattctctaagcaaataagctaacatcccagaatggaattatagaaagattgcaccagtcaaaaaaggcatttggtatacatattctaagaaatgctacataataacaatatgaattaataataaattaccttctttcaccttgaactgaaggatttgcaaattttctcaagttctctttcatttgaccttcacaacaaacctgtgacatttcttaccccctatgaatggttaaggaaaagactcagaaagtgggttcttgcttcttcagatcccagatgactcctgaaatattcataattctgatcttaaaaaaaatataacacagatggtaggacatgcctcgtgaatcaggtaataccctggcagcatctcccttagagcgtagaattccacaggcagggatgtgccaaacacctctgcacgccaagctgggtgtagcaactccatcaaatccattggatcacgatgatcctggtacagggagaggggacaatggaacaaccaaggccctggaagacagcaactgaaaattttgacctgtggttcaccagcttgaatccagcactgggatgtcgggggtggggtgttccagggaaaaagaccacagcttctggatggttccaagaagataggttccctcattaaaactggtatcaaccaaccctcttgtacacagacccctgtggtgggtgtcaaggggaaagaaacagatgggcccaggatagataacacagatgcccagtccctgcccccaagaaagctgcccctgccagttgagaacactgctgcatctcatctgaagagaagcctacacagcagtcctggaattccaaatcaggtggaagaaggcagatggcgcaaaataaactcaagaaacagacaatgggaagtaagcatcaagccaggtaccttgacacagtacctctggcatggtccccaacagctggcctgttggcctccccaaacaatgcctctttctaatgagtctttctttaaagtggtcaccgactatacaccttagtgtagagctgctggtacaacttcctgtaacatagcagttgcagtgaagctccagggctacgctgggagtatgagtgactggctcagccccagaaggcaagtcactctccgtgtcctggtcagcccagcccctgtcactgggcaacatgtggttgtgttcagacatctcccacctgtccataaaaggtgaggtctaatggtggcctctttgggacaaccttagggcaatggggcatacgtccaggactgaggctgagaagcacacactggtgcatccctaccagggtgaaaatattgaaatcctttttacatggtggtaagtagcagcttccctgaattcctgcatgcctactaccaccacccagcctctacaatgggactccatgcctccccatgatccagcgactgaagggttggacctggcacagtcgacacttctctaggactctgtcggtgcccaggcagctgtgtaattgtgaaatgctttgaatatcctccccacacgggcccagtcaatggtgctgcaccttaacccaaacacctcactagtagaaaggctaaggaactcaccttcctaagaacctgttgaggccacaccaccagctgtcctccactgggcaagaaggtgtcacccccagctctcctctctagctagggatcctccattcctgctgagagggacaatcctggaaaaagaactatagcccttcaggtattgtatccatacctctgagtctatgtgtgtttttgagaggaaaaaaaaatgcttctggtttcacctttagaactaaaaatctggttgatctaatatgctagacatttcagcaatctctggcccaacacagagtagggtgccactgttctctatattcctggcccagctgaatcacagcatcatagcatttaagcaccctcaactatattcagcccgatatgtttaaaactgcaggttatggccaggcatggtggctcacacctataatcccagcactttgggaggctgaagcaggtggatcacgaggtcaggagtttaagatcagcctgaccaacatggtgaaaccctgtctctactaaaaatacaaaaaaaaaaaatcagccaggcgtggtggcgggtgcctgtaatctcagctactcaggaggctgaggcaggagaattacttgaaccctggaggtggaggctgcagtgagccaagatcgcgctactgcactccagcctgggtgacagtgcgagactctgtcaacaaaaacaaaacaaaataaaacaaaaaccctgcaggttatgacccatcagcaggtcacagaatcaactgaatcattcacaatcagcatttttcaactgaaacaacagcacagaaaacagagtactgcatattaaaagggttgctgcatggaacttttgtttaattacatacatgaacataagtattgggttgagaaagaaaaggtatttcttattctgggtttcaggggaaaaagcttttgaaagcccctgatctagctaactccactctatcattgatgaggaaactgaggctcagagaacagcatggtcaaggccactcagagaatgtgcagccaggtgaggtggttctcagtccatgcagcctgcggactttgcttttcttctaagcagctctggctctggccatgggcattgggattctgggatgctaagtagctggctcctcagttcctaagagctgtgctcaagtggtctctagtgccattgagattttccccagcagagtaacccttagcactagatctcctgaggctgaccaggaggccctgagaagagatgccagccaagcaccccatcccccattcccacagcctggtagtgggtttgggcccagcctctacatctcattctctctttataaagtctcaagcaaactgtgtggctgggactttataataaacttggagccttcttcaagctgaggctccagcaaacaactagatctttctgagcagatgcttctgctctttaggcaggcttcctgtctctacaggtggtctagccctgggactactggaaaaatgagggagtgagggtgtgctttgtgagaggctgggacaggggaacggctcctcctgacaatgtatggaaacacttttttttttcaattaaaaatagcatagatcacagatgagaaactaactagaactatataaaaatacaactttttttttttccaatgggacctgcttagatagaagctaacattccctgaaaactatttgtcaagcattgtgctatgggcttcacacacattatctccctggatggtatagtagttatctcacttgatataaaataaagttcagtgataccagtgaatgtattaatgacatacacagagctatcacttctacagtgcttattctattctaagaattttgtgtgttatttgatctcatcatcagcttgatacagttggtgctattctcatccccactttgcggattatgaattgaggtaagaaaggctacctgacatgcccacactcacatagatactaagtggtggggccagggtttgaacccagatggtccaagctttggaccctcctaattacctccactacactggttatgattccttccactttctggcgcagaagcagagactcgggaaagttaaatcatttgtgtccactccacccagaagctctccacgtacaccagagggatggaaaacatttaacaatgggtaaggcaggtccatgaccttcacaaggggcaccattggctaggctggagacctcctgctatgctggaaactgagccattttaggggctgcttcaaggggaaacccagagggtttcagagaagggataaggtaacagggacactcacagcacttagggcaatgtctattttaatcagcagggaagttttccaatatgttatcaattttggccactgcaaacagccaagataagacagtgctaaagctcttagtcgaaactgaatttttgcatgtttcggggctggaaagaactcttgagccatatagaattcaacagcctcattttaccaatgaggaaaccaaggctgctatgcaaagcatggtgcccaaggtcagagaactagtaaatgacagagtcaaaatgaaaatccagggtgcccagatgcccagattggtacttagggtgtttggtggtggtggtttgtttcttccctatctgtgctgattatattcaatacacagatgctgatgtgcatgcacggggcccagcccccagctgctgtgccacaccctgacaacctcaggatcttcagagaggctcagctgctcaaagttccaccagggaccatacaagcttcatggatattcagattttttttagtaagcacctgaattttgtgtaactgatttccacacccattgaaggcggcttctaaatttagaattaacatccaaagcggtctgttgcacaaatgtatacttcctcgcaagctgttgtcagaaacagtaaaactgacatccataaaacagtttcttcataccttaataatattgaactataaaaatagaggatctcaagcaaacaaagctgtaaccataataacctttacaaagtctactaccacagtcaagtactgtccagatctttttttaatgaaaatgtaaaggtggccccagccttattctcacatgacaatgcaattccctaggcccagcattccctctagacacttgtcactgcccaatccagaactttagtaattgatcatttggggtaataacctgcaccttatacaataaagccacctttgcagaaactgcagcttcactttcatcacttcctcctttgcctattccaattagttgcttagattcagttagacacgtctccccataccaagcacattcagttgtgccaggaggatggaagaagtctttctttcaagacatcttaacaaagtagacattgcaacgcaataaagtagtgagactcatggttgatgcttacacacaatcttccaacagaatgctttatcatcccttgcccagaacagatggggaaaaaattacgctatgccctgaaattttccattcttgatctcagcccaaaggtgacttttttatttttaaacttgagacttgagcaaaaaaaaaaaagttcaactatttttgattcatgcccaggctaaagaaacacatggtaagattctttttttttccaaacccgtaggtagctcaaacagctaagcttcaaaagctcaagctttccaactagcactaatagtgttcacagaggcagcacctctgcagtaattgcaaggccaaaaatcaatagccggggtgagaaggagctgggattccactttctggacacattgtccccagtacctctaaatacttaaaagaaccgcatagaattctcaaatgtttaagcaggatggttgggcctgaagcttttcctcccttctgggtgataaggcaacccgtcctcatcaccattttttcattacccatcctttgatgcatttcagtcctctcgagagtccaggctacccagagagaactgacaggtctcctgactgccctctgtccccagaacttgctctcttctaccccgtccctcccagccctagccccaacactgactcctctactccttctaccctccctccatcctgctattcccagtctccatagaggaaaaagggagtgtcatgcctagatgaaaagatttggggttcaagtcaccccatgtacctccctggttccaacgaacctccggaattctagccacagatccccctcttgccctctcatcctcccctaacacatccctacacattgcaggcccaggggggagtccacaaaatgggactccatgcatccatccttctgtggggccgcgtagcacacccacggcaagactccagtccctggtcccggctctgccacttatgaactgtgtgcccataagcaagtcgtctcttgctctgcagactggggcttatcacatttgtcccacctgtcccagagagctgttatgcaaagtaaggggaatcacagatgtgaacaggcttcagaatcagagctcaatataaatgtacctccttattattaggcacatggcacagtgccaggcagtgtggtatgttccttggggctaaagtccaagagatattggcaataaaagaaagtgaattataccgggcagaaaacaaggaacaaaaagagaagaacagagatgaggattcaccagcctccagagaagagtgaattcacagtgacagtgcaatcaataaaggcttcctgcaagaggaaggctttgtatgcagcctgaagtggctctcaccacgctgatcaaaggtgatttcatggccaggcatggtggctcatgcctgtaacacgagcactttgggaggccgaggcggacagatcacttgaggtcaggagttcaagaccagcctgggcaatatggtgaaaccccatctctactaaaaatacaaaaattagccaggtattttttttacaggtggcacatgcctgtaatcccaactactctggaggctgagacagaagaatcacttgaacctgggaggcaaagattgaagtgaaccaagatcacaccactgtactccagcctgggcaacagagcaagactctgtctcaaaaataaatttaaatttaaatgtaaaaaaggtgatttcatgcatgccccttcccaagaccaagcgctctttgagggcaggtgacatgtctttatgtctcagccttcgcagcttcctcctggcatctaggtgaaagaaagaatgaatggagccttgaactaaccaggaactcaactaagtggaaaagaggagagactcccagatagcagagggaagacaagctggggtcagagggcggactctttggcttaggagtagaggagttcagaagttcaggcttctgatcacaaagggaggtaaaaggagttcagaggagtcagtgacatcatgaaatcagtatttggggagcttaattgggcagctgcatgcaggatatgcagcagggggtgaaggaaagctggcagagtggccaggaggcaagggcaatgagtcaggcagacggtgagaagggaagccactgcctctcggccaaatcgccctctgggagcacccatctctgtcccagtggaagccccatcaagggccactctcagtgactgtcctctttaggctggaccttaagtgtcccctagtcctcctgccttgcacccagcactggcctcctgcaagtggttaccttccccttgtgaatccctccaggctcagggattccagggattccagggattccctcccattcccgttttagaggacaacgcggatggtaagcactcccttaaaggaagcacagtgatgcagcagcgggcggggaaacagggagagagcttttacttctgagcacattttcccaaattgctatcttttcaacacttttataaggtagtatgttaatatgacagttaagatgatgataaaaagaaggtagaggaaaaaaatgtggaagacaggaccagtgcattcaacacacagctcagacatgattgagaaacagatcctggtgctgaagagctggggacaggagcctggtgatgggcagcctcggttccagggcaggccctgccaccaacgcactgtgtgaccttaagcagctgtgctcttcccagtcactctcttccacctgtaaaatgatgtcagagatagttcccacccaagagggtagttgtaagaaggaaatgagttgatctggtgcagtgcttagtacttggcacaagataagtggttagtaactggtatctgtgatgggcaccaggctagcagttactgcctctaacatctggagacgcaaaccctagcactgcagctatcccacaggaggtgtcaaatgtgagcctcccaccccatccccctgagatccccacatgaatgcacctccccacagccctaacgctctcaccagggacacacagaacaagccagtgcctcctcgctttacagaccatcagaaatgcaaaggcagttgctgtgcctccacggaatattctctcccctaaaatcttcatgtttttctctcctcttatttctcttctattcacctactgcacaaacaagatcaggcagcagtgataggcaaggaaagatggaaatattctttaagtggaatagcaaaaataggctttggaaattaatgcctagaaatttaccctgtgggctctctggagaccaacccaaatgaaatcccattgacagaaagctgcagccctctggggaatgtccccccatcccatcccccaggatccttggtccaggaaacatggaagttggcttctgatctccctggtctcccagggatcctgctcggggcaccacctgaaaagtccctcggcagaagcacttctcgccatgcgtgaatgctgtggaaagcatctgaacatgaagtttccaattactgctggcatttctggagtgtcctgatgctggctgcagctgtcccacggaaggccagtgatgtcatcagcaagcctgacagcactgagttccaaggctggctgggaagaaaggttccctgcaggctgagcccccatcactggagagggaggaacctgccatttcccccgcaaaggtgggcactactcaggtttgctgcttcccttcctgggtagaattccattgccataacttggactcacaccaggaaaggttcagaagctgcaccaatgtccaggatgattccatctgactgcttctgaaaacttactatgtgtccagagttgttccgggtggaggcaagcccaggtgagacctactttccaaatgttcatgtactcacttcgtggcatgaaaacaaaatggtcttgcattcttcggctacagagagacaataagggaagtaaaaaagggaaagagagaaacggagaaaaagcaaaagaaggaaaaggtgggaaggaaatgaaaagaggaaaagagagagaggggaagggaaggaaggagggagaaaaggagggaagaagtttttgtcctgtggctagttttaccttgaacctccctactcaagaccttcccagttcctctctcctcctctcccttgctcagggagctcaggccctgggggagccctggcagataccgtcctctagaagagctgaccaaggagacagagcacgggatgcctgcagagcgatgtaacagattgggccctgagccctacagtagagttcaagctcaacgcaatgttcagatttcccaaggcgggggattagattaattggaatttgcaggctgtgcccaaccaagatccatatctgtcaccatgttaaccacattcaggcccctcttaaaatcagaaccccgccatccatcaccaccccggtggagaggcacggccagagcctcgcagtccaagactgaccttctggctggcagcctaccttttagccgccagcctcctccatgggcttccagataagcgtgtgtaactcttgagcaaatcctagcccctggaggaactaccggcagttatgaacacagtccctttgttcatctcaggagctgatttaattaaacgagaaactatggacccttcctaagggagaaactatttagtatccagaaccaaggaaagtaaaggctaaagggaaatccagatcctttcaaaaactatctaattgaaccttgggagcaaaaccatgcagtcaaattacacaagaggatccaaggggctgcagtgtaacccaaggtgacacagccattaagtgaaacactcaggtctgagctagggcaccctttccaatgcattatgacacatttaatctgtaaaactgtaaattattttttttaaaaaaactgtcttgggccaggtgctatggctcacacctataatcccagcactttgggaggccaaggcaagtggactgcttgagctcaggagtccaacactagcctggccaacatggtgaaaccctgtctctacaaaaagtacaaaaattagccaggtgtgctctacgcaaataaactagaaaatctagaagaaatggataaattcctcgacacatacactctcccaagactaaaccaggaagaagttgaatctctgaatagaccaataacaggagctgaaattgtggcaataatcaatagcttaccaatgaaaaagagtccaagaccagatgcattcacagccgaattctaccagaggtacaaggaggaactggtaccattccttctgaaactattccaatcaatagaaaaagagggaatcctccctaactcattttatgaggccagcatcatcctgataccaaagcctggcagagacacaacaaaaagagagaattttagaccaatatccttgatgaacattgatgcaaaaatcctcaataaaatactggcaaaccgaatccagcagcacatcaaaaagcttatccaccatgatcaagtcggcttcatccctgggatgcaaggctggttccacatatgcaaatcaataaatgtaatccagcatataaacagaaccaaagacaaaaaccacatgattatctcaatagatgcagaaaaggcctttgacaaaattcaacaacccttcatgctaaaaactctcaataaattaggtactgatgggacgtatctcaaaataataagagctatctatgacaaacccacagccaatatcatactgaatgggcaaaaactggaagcattccctttgaaaactggcacaagacagggatgccctctctcaccactcctattcaacatagtgttggaagttctggccagggcaattaggcaggagaaggaaataaagggtattcaattagaaaaagaggaagtcaaattgtccctgtttgcagatgacatgattgtatatctagaaaaccccattgtctcagcccaaaatctccttaagctgataagcaagttcagcaaagtctcaggatacaaaatcaatgtacaaaaatcacaagcattctcatacaccaacaacagacaaacagagagccaaatcatgagtgaactcccattcacaattgcttcaaagagaataaaatacctaggaatccaacttacaagggatgtgaaggacctcttcaaggagaactacaaaccactgctcaaggaaataaaagaggatacaaacaaatggaagaacattccatgctcatgggtaggaagaatcaatatcgtgaaaatggccatactgcccaaggtaatttacagattcaatgccatccccatcaagctaccaatgactttcttcacagaattggaaaaaactactttaaagttcatatggaaccaaaaaagagcccgcattgccaagtcaatcctaagccaaaagaacaaagctggaggcatcacactacctgacttcaaactatactacaaggctacagtaaccaaaacagcatggtactgttaccaaaacagagatatagatcaatggaacagaacagagccctcagaaataacgctgcatatctacaactatctgatctttgacaaacctgacaaaaacaagcaatggggaaacgattccctatttaataaatggtgctgggaaaactggctagccatatgtagaaagctgaaactggatcccttccttacaccttatacaaaaatcaattcaagatggattaaagacttaaatgttagacctaaaaccataaaaactgtagaagaaaacctaggcattaccattcaggacataggcatgggcaaggacttcatgtctaaaacaccaaaagcaatagcaacaaaagtcaaaattgacagatgggatctaattaaactcaagagcttctgcacagcaaaagaaattaccatcagagtgaacaggcaacctacaaaatgggagaaaattttcacaacctactcatctgacaaagggctaatatccagagtctacaatgaactcaaacaaatttacaagaaaaaaacaaacaaccccatcaaaaagtgggcaaaggacatgaacagacacttctcaaaagaagacatttatgcagccaaaaaacacacgaaaaaatgctcaccatcactggccatcagagaaatgcaaatcaaaaccacaatgagataccatctcacaccagttcgaatggcaatcattaaaaagtcaggaaacaacaggtgctggagaggatgtggagaaataggaacacttttacactgttggtgggactgtaaactagttcaaccattgcggaagtcagtgtggcgattcctcagggatctagaactagaaataccatttgacccagccatcccattactgggtatatacccaaaggactataaatcatgctgctataaagacacatgcacacgtatgtttattgcggcattattcacaatagcaaagacttggaaccaacccaaatgtccaacaatgatagactggattaagaaaatgtggcacatatacaccatggaatactacgcagccataaaaaatcatgagttcatgtcctttgtagggacatggatgaaattggaaatcatcattctcagtaaactatctcaagaacaaaaaaccaaacaccgcatattctcactcacaggtgggaattgaacaatgagaacacatggacacaggaaggggaacatcacactctggggactgttgtggggtagggggaggggggagggatagcattgggagatatacctaatgctagatgacgagttagtgggtgcagcgcaccagcatggcacatgtatacatatgtaactaacctgaacattgtgcacatgtaccctaaaacttaaagtataataataataaaaaaaagaaattacttttgaatgggaaaaaaaaaaattagccaggtgtggtggcacatgcctatggtaccagctactctggaagctgaggcaggaggatcactcgagcctgggaggtggaggctgcagtgagacaggattgcgccactgcactagaacctgggcaacagagccagactctgtctcaaaaaaaaaaaaatactttctttgatatatctttatgagaattgctatcttaatgttgctcataaaaataacttacacaaatgtgtgccaattgctgaagatcttcagtttcagttattctattttttatttctggaagtcctatttgtattcttcaaatctccacggattttaaaaattagtctattgtttcttcctcatttgtttcaaacatttaaaatacattacctattccattggaactatatctgaaaccctcgggaatctgattcttctgtctgttgtttctgctgactttcactcgtggtgactggtttcctcatctgttttggattttgagagtgaaagctcatgcttgaatggctgggttttacctacaggaatccatcaaggcttgagctacaagtatgtccctccagagagaatgtgcatttgattctgacaggaactctggtgtgaccaaccccaaactacctccagttaattttgcagcgtggagtctcctgggtcacccaggcagtacaaattcaaaccccaaacttgcatgaaggcagacttatgattacaaattctcacagcaaacattgttccatcctttggcaagccaaagccaaaacagataagggcccctgtcttctccctttgcccccctgcagatgtctgctggaccacctgtctgtcccctagggatatatttctcctgtaggggaaagcttcagacagaaatctcatttccaactccccacctggcaagggtcccaggtctggctccctgggtattctaaaggccatgctttcaatcctggcttaaagcctgacacgccctcaatctgatttattgtaaacacagcgaagtctttcttagagcctagatctgtgctttttcccgtacctaatttaaagctagatacacctttctttggtctttggagcccagagttcccagggccttctaaggaataagctttcaaaactttgaaatgtagatgtatttataggaaaaggaaagcagcagcaacaaggttttaatgacctataaggctaatggaagggaggaaaaaacgcacacgcctgtgtagtcagcagttccaattgaggagcatctgaaatgctgtaagaaggtagaacaaagtgggaaatattagaacagagcagagtggatggggaaagaatctacaaagactgtagagacatttctctctgtctccgtatctttctgggtcattcttcgtcacaggatgtcaacataagaggtatattttaccctatacacacatgatgtgggccaaaagttgaaaatgagtgtaggattagaaactacaattcagaattttaaaaagaaaccagaccacacacaacaacttatccaggtagtttccagaaggcttcatagccatcactcagttcgtcctcacaaaagccctcaaaagtgcattttataaccagtaatggccaaccttctgataaccagtctactgtactttctcacatctgtcactacttcttatcaaaaaaaaattcattgattaatcaataatacgtttgggaggctgatatgtctggatcacttgagcccagaagttcgaggcagcctgggcaacatggcaaaactctgtcgctccaaaaaaaaaaaaaatccatatatatatatatatatatatatatatatatataaattagctgggcatggtggcatgtgcctatagtcccagctactcaggaggctgaggcaggataatcgcttgagctcgagaggtcaaggctgcagtgagccatgatcatgccactgtgctccagcctgggcaacagagtgagatcttgtctcaaaaaaaaaaaaaaatcaataacatgcacacactgcaaatatatctccagctctatgattcctcactcaaaatcttcaaaaccagatgtgttttagaattccaattgtttcgggttttaggaaattattaaggtgaatctctgaggtttgggctgcacatcacagtcacacacactaacatttcttcaatgacacacgacaattcagactaagctggatgaatgaagaccataaactgcctcgcagttcagggcagcttccactcaccaccagcccctccatgaattaggtaaaaacactcacttttcagagtttgggggacttcaggttgggaatgagctggtgtagaactggatacataagtcatctctcaaaatatcttatatttaaatccatcagcttaaaagtccttcccactaagtctcaaaatcttcactctgattctcagaaggggcagaaaagaacagtgatcagaagaggagaggagcatgaaacagttgatggccagagagagcccagtgggcctccccgggagccatgatgtgtagtgtgtgcatgggcggtggggatgtgtaggcataaaaccacaggataggtcagacatgacccaggaagactcttaacaaagcctcaggtgtaacagcaggggcaggctgggcaggggtggccctcagtacagttgcatttggcctcagatttgtgactaagagaagcataatatgaggcaaaacctcagcatcctcctctacagcaggagagctggactacaacagcaatttcagatggcaggcctcaaccccctggttgaccaggaaatctatgtaacaggttataagcaattattttttaagaaaatggaatggaatggaatggaatggaatggaatggaatagaatagaatagaatagaatagaatagaatagaatagaatagaatagaatagaatagaatagaatagaatagaatagaataggtctgtacctcgctcaacagggacagaagcttctgtactcaggacccttccagactcaccctgtatacctgtccacctgcctgttcatttatatcctttataatactctttttttttttttttttctgagacagggtctcactctgtcacccaggctggagtgcagtgacacaatctcagctcactgcaacttccgcctcccaggctcaagtgattctcccacgtcagcctcccgagtagttaggactacatgcgtgtgccaatgccaggctaatttttgtatttttagtagagacagggtttcaccatgttggccaggctggtctcgaactcctggcctgaagcgatccacccatcttggcctccaaaagtgctgggattacaggcatgagccactgtacccagacctatcctttgtaacattctttataatgaaaagattatgtcaagctgcatctcatgtggtaaggacagccattgtttcaggaacttttctttctataagatatatatattaatatctatgcgtgtgtatatatatatatatataaaatctagcagaatgtatccacatgtatatataacacatagatataatacacatgtatatacacaatgtatgctttgcacacacaatgtgtgctttaactgtgggatgtggtctaaaaaatttaggatttactgtgctagatgactgcctctgaatctttttaacacaaacatcctgtggattgttttttctggtgttactgaatccaggcattctgtattaaaatcatcccagactgaaaatcaaaaagaagtctcgttaaattctctctttttcaggatgtactttagccactgggacctgacttctaaggtctctgccactcactcattatgaccactagggcatttatctaatctctgagcctttagttccttatttctgaaatgcagaggctgaccatcacagacctctgaagagcaactgctcacataaaattggagaaatgacgactcctagctcatagaatggtcgtgaggatcacatgaggtcatactttgaatggtgcacccaacacactgtaagtgccatataattttgcctctaagacaagactatgaatgctttccatgtctggtgcttcatgatgcttttgaatccagtattcattttgcacatgcagcctgcttggagtgggagctgatggctttcaggaggccccagggcctgaccactgcaggggctgggaccacagatcgtaccaccaccctttgttcctgcctcctcctagcccttgggaggcaaagcttgtcccctcaataaatgatgaccagaaccctgtgtttgttgcccagcctcctgggagatgggcagtggcatagcaaagggattactttgggtaaatatttctctaaacctcattcttgcctccaccagtgcccagaacgagccggccagctccccaacagccccaccgttccaatgctaggacagtgctgacagcatcagctccctgaatacagggcaaatgacctcactaaaggtaagccccagaattaagcagtggtggcagaggctgggaagcacaagaggaggagaatgcatgaactgttctctcaaggcactagcgatttccttttccagagcaggttatcgtctttacagcacttagtacttggaccaaacagccaccacattgcaattccacctgaggccatggcgggcatccaatcctgcctcctccaaaacgggaatcttggctgcacctttctggacagatggaagcccactttctggtgtgccttccagaacccagggagctaagtcttaatgctccccaaggcaccttcccatcactggcaggcaaacagaggttagtctacccaactgatagctgagaacgctgagatttagttcacaggcctaaaatgctggttcgcaatattggctgcacattaggatcacccggggagcatctgaagttcccagagtccctgccatacccagaggctattcggatttgttccaagcatttgctttatctccccaggagtttccaacgtgcaggtgctctggctcttggttatcgatctcactggtgcctcagagccactggaaggccagttaaaatagagccctgggccccacccccagaggggagtccctgacttgggggttgggcctctgaatttccatttccaacaagctcccaggtgaggctgatgctactggtccagagaggaaactagagctttgagatccagtgctcaaggcccatgtttctagccttaggcttctcagccatggattggggagaatggctcctggcttgagaagctctgttctagaatagcactcctcagtcttctgtgtgcacatccggacgcatctagattcatgcccaggaggtttgggtggaacctgtgctgctgatcctctaaccaccgtctgaggaacaaggccctagactagcaggcctgactgccaaatctacattcttcccacttcaagcaggtctagggccaggcaactcgcccttccctaacagagatctgcctccttgaaacctccactctgagagacttgctctgagccacaggacaaagaaaaagacttcctctcccagaaaggcacccaggtatcctgtccccacctctacctcttagcctctctttctccctacgaaacaatcccccatcctttaactcctcttgctatgtcacaacaaacaaaacctcagggatcttggaagcaggcggactctcggcctctcccagcacttgatggggcagtactacgtgacatttaagtcccctccactggagacgtgcttcctaagtgtccaccacatgctgcatatggtcctcagggcttgggacccagctggggcacaatgacagaaacacaggaagcacacagccgtgcaagaaagctcaccatgggattctaaaaggagtgacgctaacagctggaacaagaagactgcaaaggaagaagatccagttcccatctgcaggccaggggtctcaggactgctagccttctgccctctaagccactggtcccattctctagcctagagagctacaggatatcaagcctcgagatgctggtaacctgtccaagtcatttaacgggaggaggaaggacgacaatggcttacactgtttcccatgcaccatgtgttaggcactgtgtgaaatgctctgcaagtattatttcattcaattctcactgaaatcccatgaaatgctcattgctatggcaccacagtttaacaggaaagaatggagaagaatggagaattacagatgtgaagtagcatgccaaacaggaggtaacagcagtaactgaccccatgttgacgagcctacacactctctttttttttctttcctcggctcactgcaacctctgcctcccgggttcaagcaattctctgcctcagcctcccgagtggctgggattacaggcgcccaccaccatgcccggctaatttttttgtatttttagtagagacgggggtttcaccatcttggccaggctggtcttgaactcctgaccttgtgatccactcgcctcggcctcccaaagtgctgggattgcaggcgtgagccaccacgcccggctcacactctcttaactgccatgtagttgaagcagttaacttgccttaactgcctaaagatgaggcacttaacttgcctcatcaaggaccgggagagaccgagactcagcctccttccaagatccaggtttctatgcaagatggtcccgtcctcaggccatttcatatggtaataaataacatcaagcaatataattgcacttaatacaccaggcaactctaaactacatgtgtatacacatatatacacacatacgtaacttatgtatagataaaaacatacactcattccatcctcacaacagccttctttgtaaatatctagatttccattgtgcagatgggaaaactaaaggacaaagagcttgggtaactagggtctcccagctagttggtggtgaagccagaatttgaactctgacagtctggtttccaggttgtgctggtgacatccccctgccccctccacagttcacattggctttggtgcctaaactgaataaagagcacagttcaaggtgctttctgtgcccacattgcacccagtccagtggccaaatcctctgcaggtaccttgataaacatccagtaaggaccaaacaggtgcctcctgccctatttatagctcccagcatggccagctagctataattagcaaagctcccctaggactggagctaaattaaactggtgggattagaggccagcagcttcggacagtgcctctggacacctccagcaacacaccactggtgatactaagagaagcctcttcaaagaagtagtttggcctcaccagtgggcctttctcctgagtggtgtgtggacccaaggggttcctttaatggcctcctcccaattctagtggctgatctgtcctgagatcccccaattaaatcagaagaagatgagtgatctcatgctctaagggtcagaaaaccagaactctggtcccggctgtgccgctgatcagcccggtggccaagggactcaactgctctgggtttcagctttgcttcttgagatgaagacaggcctatctctgaagtccttcttggccggaaaatcccagacatctcacagatctcaaaaaggggcttccagttaagtcctgtggtagggatcaaatgccctctagagaagggtctgagggaagcctgcagcccccaacgagggaggaggactctgacttgaaagtctggtgtaaactcttaggctgctggtgctgtgagcctggaagaagagaagtgacaacctctcaccacctcctggagcctgaagaggacaaagaaagagatctcatcttccctctcgctccagagtatccagccgccaagggctctgcctctctcgggactcagatgtcacctcctcagaggccttcctgggttccttatctagaaaatccacctgccaccacttcctagccactggccagggcactcccaagacatggactctcatcccctatatatttgttaaaatgtgcattaactgtctgtatctcccactgggatgtgagccccacagaggcagggcctgcatctgtgctcttcacatctagagcacctggcatataccaggcactgggtctgctgactcagtgagccattttggccccaggcctcctttctctgtgctgagcgcccagctgccaacctcccggagtcgttgggcttctgtttttcctgtccaaacagggagggagccactaaaccaaacaggatgaaagggaaagaggggaggtcaggaagccttcttggagaaggggatttcttcaaggatgagtcagtgatgtctagccaaggaagcagcaaggatggagagaagagaaggggcaaagcacagaggtggaaatggcccatgcagggcatctgccggcagctgggagttgctaagagcatggaaggttatcaaagcaggagggatcagggaggcaggggtgtcagtgacaaatggccacaggtgtgtgcgaagaagcctgaattttatcctacagctcaggtgtgggcaaacttctctgtaacaagctgtcaatctgtcacaattactcaactctgccacggtaagcttgaaagcagccataaaagatacatcagtgaatgcagatggctctttcccaataaaactttatttatagatatttgaatctgaatatcttatcatgttcatatgtcgaaaatataatgtgtctattgtttttttcaaccatttaaagagatagaacccatccttagctcatggactatacaaaaagaagtggccggtagactcctgctgtgggcaatggggaagttttgggaggttttaagaaaaagaaagacaagatctgggttacgtcttcaagaggcctctctggtggccagtaaagaacggaccagtgaaggtgttattccagaggctgggagaccctcaggaggcccttgtgatggtttaggtggaagacagaagggatcccagcaaaggaaatgagtcacagaagctcccctagaaagtgatttccatctgacccattggggcagtgaggcaggtgtccccggatgtttcttccatgaacagcaattgaattgaatgccaaatttgaatttggataacagcctctcgtcctagcaaaccagattaatactaatcactttccctccccacacatatccagctaactttccataaaatgctatccttaataaatccagaaaacaaacaaaaaccttcaatgtctacaataagattatagtatatatataagaaatgtctggccgagcaccgtggctcatgcctgtaatcccagcactttgggaggccgaggcgggcagatcacgaggtctggagatcgagaccatcttggctaacatagtgaaaccccgtctccactaaaaatacaaaaaattagccgggcgtggtggcgggcgcctgtagtcccagctacttgggaggctgaggcagaagaatggtgtgaacccaggaggtggagcttgcagtgagccgagatggcgccactgcactccagcctggacaacagagggagactccatctcaaaaaaaaaaaaaaaaagaaatgtctttattttcagaaatgcaaactaaaatctctagggatgaaatcctgtgatattggtaactgactttcaacatatttcagcaaataaaaaatgaacgcatcaaaaacagctccaatctctactgccttcctcctggcccatgacttgggaaatgcagggcagggtcagcctgccccaggatcccacacacacttctaggaggtaggtgtctctggatccatgtggcctgtgcatgtgatgaggggcctcttgctcctgcagaagagccatctgtgctttgcaaaagaggtcagagtcccaagccatagcagccaagggcagagaccaaagtccagacctgttcctgaagctaaaccactgttgcaggtacctttgctctccgtgatcttttgccaatgacccaaaaagaagctgtgaatttctgaccctgcactcataaatgctggtgtccatcaagcccttaccatgtggcccaatactttatatgcattattatctttcctaaacttcacaacaagcctatgggaaatatactattttctccactttgcagatgaggaaactgaggcttagagtacaacctgtgccatcatacaggtccccacacctgggaagaatccatgcttggcttaatgctctgctatcaccatcataaaattcttcatacattttataggaaccctacattcgcattctgcacaggaccctgcaagttacatagccaatctcactcaggtctcacggctcactggtggtgacatcaggggtaatgcaggcagtaggactccagcacctgcctgccatccatgacagtgttagaaatttcatgtaagtggctatttgattccaggctgctaaaagccaaagccaggacagacaccaggctctgtttgatacccaattctcaacacttttttttttttgagacagagtctcgctctgtcacccaggcagagtgcagtggcgtgatctcggctcactgtaacctctgcctcccgggttcacggcattctcctgcctcagcctcagtagctgggactacaggtgcccgccaccacgcctgtttaattttttgtatttttagtagagatggggtttcaccgtgttagccaggatggtctcgatctcctgacctagtgatccacccacctcagcctcccaaagtgctgggattacaggcgtgagccaccacacccagccccaattctggactcttaactcaggcaggacaaacagttggtggcctgggcccacccaactgccgtgctcagttgccttactccctccactctcagcctccttgagaagcacctttcctctctcggccacttctgtttcctccacagtgaccttggaacggtgactaggagtgctgcaggtggtggccttagaaggacaggggccagcccagtcccactctccggctgtcactgaagaagcacatgctcctcaatggaggaagacagcttcaaagagcatctgagttttaggaagggtaggagacagctggaacagaggccgattctgccagctgtcatcggtctctgatctcctggcaagaaagctggccatagagtaaaacctctttttaaaaattcagcaaaccaggagacataccctcagggtgtagctctgaggttccaatatacatattttcccagggctgagaagactggaaatttctccagcaagatcaaatgcaatgcatctcaacccagacccaccagggcaaaagcagaatctgtccccgaaggtcaacgacatcatcactgacattgagtctagctcaggctctggagctggtctgcctgggcttgaatcctagctctgatgctcgctagctgattggccttggcaagttatttaacctcttcatatctttgtttcttcctctgtaaaacagaaataatgatgcctgcatcagggttattatgaggcataaacaacttaatatatgtggaagaggagcttaataattgctagtgattaaagttgatatcatcattttcaagctctgcttagggacctgaagaaatgctcattccctacctaatgcaagcggggcttaaaacctagatgacgggttgatgggtgcagcaaaccaccatggcacgtgtatacctatgtaacaaacctgcatgttctgcacctgtatcccagaacttaaagtaaaatttttaaaaaatgttcattcccccggaagtagccccaaccttgccatgccctaaatccgctgctctaaaatccctaacacaagcaagaagtattgcctcttcttgaccaactgcaaggaagtgcctgcttctccaggacacctacaagggcagctcacagagccatgcccctcgggggacttcttgaccttggtggtggaggccttggcagacgctcaggtgtttggttccatatttgcttccagataagactgtttagtagacatgcaactgcttagctatgccccaaggcatggggcaagccaccagccagggagggcccacttcctctgactcatctgcacacatgacaggccaccagccccatccgccaatagcaaggcaaagctgactcaggcaacatgagattacgagagcatctccctcccctcctacttcagtccacagcaatctgtgcctccaaccttctttgtgctacaaagataactcactggtccaggattatcatggtacctctgtgacaggctcatcagcagggctgctcttgccaatctcttactgctcagagcctggcccttgtagctctgcctgctcttccctggtcctgaaccttgcttctgctccttggactcccaggttgggcttcttcctggtcagtcttatgcaggtctgaccacaactagtcccactatgaagcccatcagaaatgaggtcaatgcatcactggcccagtttcacagaaagatggacgggggcacaaatggctgctggaatccaggtcctgacaaatagagacttgatagagcatggttgaatatttctcacatagggacacaagtccagaaggcatatggcatctctgagtactggatgtcataccaggagagtctcatctcaaaaggaggtgatgatcatgtatttggccttcaaagcccatgctgctataattttctaagatctgaaatctgagtaatacaacagcagtcagcttcatgaccaagagcccatccttgagggaaactgactcttcctcctctgatgagtgacttgactttccaggcaagtaaagcaggattgagcttactcctgggtctcagggttgcctccctggcctggggcagagcagatgaagaggaagtgggtgttgattcttagtggtttggggcttcaaccttgtcacctacctttcaggcctagcctcagtcctgactcaacaggagaggccaacacacccaactccacttcctaaaggctttggtgcccaaccccaagtcctgatcactactcaggaaggaaatacaaggaaatgccttccaggtaggaaaggaggtataaccatatgtagataaaaaaggaactttccatttctgtaaattgaagtcttattcacacaagagacagattgcagggggctggatttatggggtaagatgattaaattctgtgtcctctttcatatgtcatgctttatcacgcattactaaggatctgatttggtggcaatttgttgatttcttcagttcttagctcagttacaaaaacgcagtgagcaggacttgggtaccctgccagtcagctccttagggtcagagaaacaccgtcagtccacagtgctttataaccacccaaccaccttagacggggccttggtattcactacccactcgtcctcccctagcaacaagcaccaacaatccaacatatacgtaagacttgtgggaagcccttatttgtctttatagccacagaatgtggtacatttaagttgttccataaatgtttttgtttttgttttgagactaagtctcgctctgttgccaggctggagtgcactggcgcaatctcggctcactgcaacccctgcctcccaggttcaagcaattctcctgcctcagcctccagagtagctgggactacaggtgcatgccaccacgcccagctaatttttgtatttttagtagagacagggagggtttcaccatgttagccagggtggtctcgatctcttgacttcatgatctgcctgcctcagcctcccaaagtgctgggattacaggcataagccaccacgcctggccttgttccataaatgtttttaaagaagaacatgctccctgaaatccagcccatacgccattcagtctctgactctgtctctgacagagacactcaagagtgagctgggagaaggcctggctgtctgacatcacctaggaggctgaggtctgacccagtcttccagaccctaagaagtctcacagagaacccagcactcggctgcacttaaggcttccacagcacgctgttccagcatcacctccagctccctatgggaagcccacacacctggccaagggacactggagcatgcactccctgcacagtcctctcagccactctagccctttgctcacgttcttctctgaccccagaacaacctccctacccttctccaagctgtccctcaaaacccattgatcacttaagaatctccatagcagatcttttgtacttggcatactgaactctgaccacatgctgggcagtttgctggatgacaggagtaccaagaggacgaaaacacatgcctgctctcaggccactcagactatcgggggaggtgaacagaggaacaaatggctgcaactcctgcacagtcagactggctggggtgagtctcagccccacaacgcactagccgggtgacctgaagcaagtcgcttaacttaaaatgtctgtttcctcttctctcatatgaggacaagcatggtactgatttcaccaggccgttgtcgcagttgtatgaattaatataattaaagacaacatttattttactcaaaaattactggagtaagaggagtgaaggtaatgcacaagctatattacttggttttgtaccaagctcttatcagattgctttcactagattggtgccctgtgcacatggcaggccctcaagaaatgtttgtaacccttccttgaacatgctctgcactttacccagcttttctgttctcatcacctcttcaacattgtttgtataaaaattatgtattctgcaaggatgagatcagatgccacctcccctaattaggtttacatgcttcatgattcccagacgaacaacttccctgtcttgtttttggatttctcaggcatctaaaaacaggtcctcaccaccttcagttatacccatccatataggtatactatatgctcctatcagaccacagctccttgaagacaaatactgagattcatgcattgttatttggggccaaggctctagcgacagaacaattaaaaagcagtgctatttctgtaggggagcactccaaaactcctttccaaaacctttttctcataagcccatgagccagaatggctttccagaacctcatttttatcaaaaatagaaaccaatctgaccacgcacactttatatcagagtgaaatggaacatcccaaacttttatcaacatgcattttctgttcccggtatataataaagggtcccaatgtttatctaacatttttctgaaatcagtatgtaacactctccacttctgaatctgatggggcaccagtcagtttcatagtcatcactggagagactctgtgccagattttgtcttcagttgtaacacaggatcacatggtcactctactgagctattcccacccacactcttggttctagggatgatgaagggaaaaacaaaatggttctagcacctggatgcagaccgttgcatgttcgacgtccttttcttgtgctccatatgaaacatgtcccagatccttcacgagcaaccctccactgttcagtttcataggagcgcagaaaacaagtccagtttcaagtaggtagtaatttctgtttcatttcatgaacaaaatagagatgcagcaataaattacatgatttgagccctcattagtagacagtaaatgtcactgtttattaaaaagctaataatccattcaattttttaaattaagcaataagactctaatataataaatttgaataattaagcctaatattaatggagtgaaaacatgagggaagaaagaagttctaaaatctttatttttccctccacataaaacatgttaataatgatcccacaggtgaaagaagtttctatgtgcataccagtggagtacttatttgtcaaagcaagaactcacacgtatgcttagatggctggaaatctctagggaagtacagagaactctcctaactcagccctcactattgactcctagctctatttttacctgatctgtttttattgctggactccactctctttccattacatacagcctaagaattttctactccagctagaaagagctctgactaggacacaagtttacaaccaggatggttggtctgtacgtgctgtcttctccctgctcaataaaaggagagcatccttgtgttagaaatagcttggtatctgcggccataccaccctggacacacctgatcttgtctgatcttggcagctaagcagggtctggcccagttaatacttggatggaagaaacaactttgcacaacagttctaaacaaagcacagtttgaacttattcttcctgccacacagccttcccaccacgtgaggccgtagcatcatctctgcttggaaactctacaccaagattgcaccatcacgccctgaagaaggcaagaagccttttctcaggccactgaatataggcttatgtaaacaggcagtataactcagtaggcggagatgaaacatttgcacttctctccaagcattataatgagaaagcaaaactctttatacaagctaaacccttttctacattcttaagtgtccaaacaaacttttccccagcagcctgcacttctatggctttgcattattgggataagccaagagggagggaacaggagcctttcctcctaagctcagagagatcaaagaaaacaaagctagagagtgtgagggattctgcttggtgagcatttctcagcagagtggactttctgtgtctgggctgcgggcccctgagtgtccggtgctctgaggacaccttcagtggaatctgtggaaggtacacatcagatctgctcccagtaataatgccctgctttgcagaggctgttttgctttcccaggtgctttcatgtcttttattgatcaacaagcaaacacttactgagcgcctatcagatgcagggccccaggtggagttatctcaccgacagatcatctcacggccccagtcttcagatatatgtgccactctgaaaagaaaataaggcccagatctgccttcaagatgtttatagtttatttggagacataagcagagtcccacagaaagagaaataatactgcaaagcactctattttaagttagtcttcctcaaactttgatcataatcacaaccacattaggagcttattaaaagtcaaaggggcctggatcacatctttggagattctaattccatgggaatgaagcctgggtccctgtatttttaacaagcagccacaaagattaaaaatttaaaacctaagacagtgcctaagtggcaaatgagacagtcactcctgttggccgaggtcaaaggactccagcaaggtcagacataaaagagacctgcaagggcagacaggaggctgagagcagaaaggcagaaaggggcaaggtaggaagttaggagggagagggggatagggtcccaagaacaagtgcaatattcatgtaggggacagaatgcagaaaattctggatgtaggagaaggctgccctagaggattgagagatcaagacagacaggtaggtctggagtccagggccgtgggactgcagtctgggccctgatattttatcatatcaaagtaaggaggatcatgaatgacaggtgtttactttagcctggaggcaaagggtgcctcaggaatggcagggccatgagagcagagaattttagacagaggtcccgtgctaggcctggattgaaaccatcaggaagaccggaagctgggcccaaggttctagtaagatattttaatatcctgttctaccctcaccacagatcaacgaactcagcaagatagataatattatcttctttctgtagagagaaaactggagcacaaagtggccaaacagcaagaggaaacctggggaagccagaacagccatgtggctggcgctcatctttgacaaatcaatccactgcatttcaagcctattcaacatacatttattgagtgcctactaccagcaagaaacaagaagcagcaagataaacggagtgccgttcctgccctcagggagctcacctcccaggggaggagctggcaaacattttctgtgaagaaccggatagtgaatacttcagactgtgcaggccagttagtctctgtagcaaatgctcacctctgacatagcacaaaagtggccatgcacaatacacgaacaaatgagcatatctgtgttccaataaaactttatttacaaaacatgcagtgggccggattcgacctgtaatgtaccaatccctaatctagtgggtaaaacaaaccccttcatggctacttataaaacaagagaggtgtgttataaataaaacgactttgcagcccaaaggaaagatagagtaatttagtctggccatggatgactggggaggcagcactggagtaggacaagtacttagttttctaggtctcagttaaaacgatggggctgaatcagaagcacatggacggcccttcttgttcccgtgttctctgacttggatgtggtgctcctttcctgcccagagtcttccaactgcacaaacaacgtggcctctcccaagctccctgggcctctcctcacctctaccatcaagttttgaatgtcaattaaggaataaaaattcctaaatgatcctggaaggctgaacacacacacacacacgcacaaagtgtgtgtacatcctactgtgtccggaattggtgggttcttggtctgacttcaagaatgaagccgcagaccctcgcggtgagtgttacagctcttaaggtggcgcgtctggagtttgttccttctgatgttcggatgtgttcggagtttcttccttctggtgggttcatggtctcgctggctcaggcaggagtgaagctgcagaccttcgcggtgttacagctcataaaggcagcgtgggcccaaagagtgagcagcagcaggatttatcgcaaagagggaaagaacaaagcttccacagtgtggaaggggacccgggttgccactgctggctgcggcagcctgctttcattctcttatctggccccacccacatcttgctgattggtccattttacagagagccaagtggtctcttttgacagggtgctgattggtgcgttcacaatccctgagctagacacaaaggttctctaagtccccaccagagtagctagatacagagtgtccactggtgcattcacaaaccctgagctagacacagggtgctgattggtgtgtttacaaaccttgagctagatacagagtgccgactggtgtatttacaatctcttagctagacataaaggttttccaagtccccaccagactcaggagcccagctggcttcacccagtggatcccgcaccggggccgcaggtggagctgcctgccagtcccgcgccgtgcgcccgcactcctcagcccttgggtggtcgatgggactgggcgccgtggagcagggggcggcgctcctcggggaggctcgggcagcacaggagcccacggaggggcagggaggctcaggcatggcgggctgcaggtcctgagccctgccctgcgggaaggcagctaaggcccggtgagaaattgagcacagcagctgctggcccaagtgctaagcccgctgagcccacacccacccggaactcgcgctggcccgcaagcaccgctggcagcccctgttcccgcccgcgcctctccctccacacctccccgcaagctgagggagccggctccggccttggccaccccagaaaggggctcccacagtgcagcagcggtctgaagggctcctcaagtgccgccaaagtgggagcccaggcagaagaggcgcccagagcgagcgagggctgtgaggactgccagcacgctgtcacctctcactaccaccgccagatgctaagtctaaatttatttaaatttctaaaggttttctccctccttcccagaacctctccctcctgaaaaaggtccagctgcttctgtaccagacactctagcgagactcaaatgttcttcctgaccaaatgcccacctcaagaagaacctggagccaggaagaaaccaagggtggccacacacctcatctgccctgctgtgctggtgccaggcgagaaaacagaaatagagccacggagctcaacagcaacacctcatatggtgccagcagacagcgagcaaggcccaggcagataaacacattaaggcaggctgtgcagcgcaggccacgtccaggcctcagagggacttcatctcagccagccaaggtcaactccattctaaggcttagtcagcctcctcctctgggggctcagactcccctggccaagatcactcatgtaccaagaggattggacaaggccacgagtgaggccaggtgccagcagggcaaaggcaggcaaaaggcaccacagatcgcatgtggtggcagcaagccagctgtgtatagattcaagcctcagacccacctctgaaaatcctaccctactcaagcctgaccacctcctccaggaagccctcctggctcttgctaattagcagtaaattgtgtgttctcttaacatctagagtaatacttctcaacatagggttgcgagaccagcatcatcaataagcaccacctgggaagttgctggaactgctgttggaagttctcaggccccacccaggccaagcaacttagaaactctgagggtgggacccagcaattggtgttttaataatgtcctcctagtgattctaaagcaggctgtggtttgggagccactaatccaaagtctagattctaaaccactaactggacacctgtgttttacatgcaatccctgtgctcctggcttccctgggaatgtggttgcatttcagagcctggatcgcacatgcccatcaatcccccaccttgcccagcccaggatgccacagcaagtacttcctcagcaaacacctgtggaatttaattagcttgagttcagataccaccatcaggttacaaaatcacagaacctgaatgctgaaagaggctttagtgcccatccagcccaactgcccatcaaggctctgccaggacccagcttctccacgtttctctcaggtcaggtcagatgctccactaatgcctgggagttcagtctcattcgttcgcccagcaaatattgactgagcatgggtgcgaggcacacacagatgttcctgcacacaagtgaacgagaccaatgagaatccttgctcggagggagcagatattccagtggcaggagagacccaatcaatagcaataaataaataaaacaaaaaaaaacccatatgctttaaccattagaaaacatcagacacaccaaaatatacagaccgcctatgaaaataactaaccagcactcttcaccaatgtcaaagtcatgaaaggtaaggaaagacgagtcacaaaagcacactaaggagacatggtgggtacatgcaatgtgggaccctggactggatcctggaaaagaaaaacagcatcagtgggaaaagtgatgatatttgaggaaggcttaaagtttgacatgcagttttagaccaacatgaaacttgttcttttctatagtgatgtaagatgtgaacaattacgggaaactggctaacaggtagacaggaattctctgtactaatttgcaaattttctgtataatattttgatggcaaatccagttgggaaagatggtccaaataagaggtgaggtgcagttggcatccttaaatagagaagtgacatgtgggcaagatgacatttgggcaagacccagaggcaggaaaggggccaaccagtggcactgtgaatgacatgaggccaaactcagtcttgccaggatgtttacccgtttgtgcttgttcttctatccagatgaattctgaccacgctttgaacacttacaataatgctggaggaccctcagtcttctctttagaggaggcctcacagtcctgcagctgtgcccactgagtgtgccccggcagcctgagcccctggagtggacagtaagagagagcgcacaaaggcagtggggtccaataaagaccaaggttgagaccaggagcacctccaccttctttgttctggaattgccctggtctctttttcttgccagcaaaccactttagttcctactttctcctctctttgaccctgtgcccaagcttctcagcatgtgagcttctcctctaagcactgtccacatgcgcccagaaccttgagcagtggagctcagagcagggttgacgtgagtaagcagacatgagtcaggctgagactccacctaatgactaaggatcaacgtcccacccaaagttcccatgtctagcccttcagaaaggacagggaaccataatccaaagtaaaacagcctactccctaggaatgacagcccacagtcctgagttctagggacctcaaataagtctctcccttccaggcgccaggtcaccatctataaagcgatacatttggattagttaatcctcaagatgctttccagttctaacactgcataatcagtaatgtatcaaatgaaattgtgcaaggtaattgcagctttgaagtacaatgtggggtagtaatggtagcagtgatgagatctatgggctcctaccccaagtgaatcaccagaattggaaatggtaattgttactattaatataataatgtcttaaattgcagagtgcttttccatttacaaagcatttttatacacattatcttgtgtgatcctcataagaacccagtgaaagtggtaggaaaaatgttatttctttggcatagatgaggaaacaaagttcagtggccattcaattaggagtgacggtgctcagccctgagcgtaggactcaatgcctcatcttctttctgctgcttggtgctgtctttgctactccaacaacctgtgcaaccatctgtgattttgtctctctagtttttgaccaggttagttcaaggcatctgcacaataaggaaacccaggcattcccctggaggggaaagcatccaaattgtgcccagagctgccttggctcggtccatccattgggctcctgggagcacagtcctcgccaggaggggaggtagcagtattctccatttgtctccctgcagctcaaaatagaacagatgatgtatcacagctgatctcactgcagcatcagatgttttaaaataattaaataaagagaaatgggagtgtgaagaaaaaggccccaatttttcaacgctagtgtcccatgaaagtgaaaagaaagggacaatggtcaaagtcaaggtgagggggcagctcccccagaggtgccaggtttacagccgttctgtccctgccatccaagctttcctaccagtagcaatactgtcacccctcaccattcggttgcaatttgcaaaaggcaagagacaacttcctttcttgccacactctaggatagaagaagcactccagccagccaccaatttcccctcgctaagcagcccttttctcccatgcccactacatgcagagggtgacccaggcacacccagagtgggtgctcttgtgtcctgtcggatggggccagtcagcatgagagctctttgttcaaaccccgtctccctaccatttgtgtccctacctaagtgcctacccttgcccacgacacttatctccctagacctcagtctccacggttctgaactgggagttagaagcactcatcttacttcctcatagggttgtcagtgctatgaggatggagtgagatcacacttgagaagacacttcaaaaacttacaagtcccacagggcactaagagaccatggttcaccaagcacctggtcaggactgataacaatggcgtatggctggcctttcccagcctccctccagttagatggactggaagatcaagttctggccagcagaatgtgggcagagtatctgctctataaagccttcacacacgatcctgctccctctttttctcctctgccagctgaagacccagaggaggattctgggtacctagaaagggcagagccacagacacaccctttgattgtgttacatggctggagttgagggttgcttgctacagcagctaggccacctggactagcaaaatgtcccagtggagtagctgcctagaaaatctcacaatgaggttgtaaattcaagtgagtggaaaaaaaggttttagtggtcgggcgcagtagctcacgcccgtaatcccagcactttgggaggccaaggcgggcagatcacgtgaggtgaggagttcgagactagcctggccaatatagtgaaaccccatctctactaaaaaatccaaaaattagccgggcatggtggtgggcgcctgtattcccagctactggggagactgcggccagagaatcacttgaacctgggaagtggaggttgcagtgagccaagatcacgccactgcactccagcctgggttacagagcaagactctgtctcaaaaaaaaaaaaaaaaaaaaaaaaaggttttagtagcaaacagtcaagtttcctcataattcttccacccagtaataggataaaaatgagaccatataaaagatgtaccccggcacatggacttcggggccccatagttctgtgacgtctgtgttcaacctgtttgtggaacagtcagtacagcacacaccaaaatgcagctcccatctagattgttgctgaggtgctcttccttttctcaaacacctattaatagatttacactcctgacaataaagaagcgcggatcaacctctaactagccagacaggctagtttttgttttgttttgttttttgagatggactctcactctgttgcccaggctggagtgcagtggcgcaatctttgcctcccaggttcaagcgattcttctcctcagcctcccaagtagctgggactacaggtgcgcgccatcatgcccggctaatttttatatttttagtagagactgggtttctgacccatattggccaggctggtctcgaactcctgacctcgtgatccatccgcctcgacctcccaaagtgctgggattacaggcgtgagccactgcccccagcccagataggttagtttatccaatcacagtatcaaatgccctcctaatgtggacaggccatgctgggccacataagagactaataagccactagaaaaaaagtgggggacaaaggacatgaaagacaattcacaaacataaaacaaatggcccccaaacatgtaatgttcacccttactcatacaaaataaatcacgtctcacccattagactggcaaaaatcaaaaagggtggcaagatctcgaattgccgaagaagcagggaaaaggcactcacttgtactatctgtggacagggacactggttcctctccagagatcaatttcataatatctatcaacttgtaaatggcaagtccctttcaattcagcaattccacttctagaaatctatccaaaagaaatcctcatacatgcataaaaagactcatacacaagattattcattgtttgaagtgcaacagatgggacatggcctaaatgtccaacagtacaaatcacacaaatacatttggctactaaacagatgaaaagtctaccccaaagtttacacgatcctgctccataacatccggagattgggggttgggggaactggcaatcaagcgcatacccacagaggttgtaccaggatttacatgcgcacaagaagggatgctatggggaagcattatccttaagatgctacgggagcacaatccaatgttcgacaaggtgtgaatctgtttccatgcagttccttggtgttgtgcttattttaaacatatggaaaattagccataatgcaaataacacagcaacagctgtgttttcatcttcttggctattttgacgtcacagccatcaaatacaagctccaaaaaagagcgaatgatattgttcccagcagcacatgccaaaaggccacacaccttcccacgggatgaaggattccagggacatctctttttataggtgtgacttcccctctttgcagagtagctatttagcaactagagggcaaagccaggcaactgagacttaggaacagaattatatcagagaaattggcgacaacctttctggagcgaaatctaacagtgtctattaatattctatatagacatacaccttttgacttaggaattccgctctctcaacaccagcatgaaaggcaacatatatgagatgtagtggagaaagaaaccataccctgacaacaacctgaaagtccatcaaaagagaatgattgaaaaaattatggtacctctataccgtgaaaattctgtaattatattttaaaatgagatctatatctacaggaagatatagatctcatctctcctgcctcaggagagatgttcaggatgaaaaacgtagttatcaacaatgtattgtatatttctaatgcatatttcaaagtagctagaagagaaagaatttcagatgtccccaacacatagaaatgataaatactcaaggtgatggataccccaaattccctgacttgatcattatacattccacacatgtaacaaatatcacacataccccataaataggtaaaatattatgtatcaataaataataataaattgaaatttaaaaagaaaagcaagaggcaggggacaagaatgtaataagatcccattttcattaaacaactgaaaagccatatacaaggctcacaaggccctacccaatctgccctcctccaattccttcccctccttctgtgacttcatttcctgcctttattcctgtcacatgctctgctctgtcccattgacaggacacatttctaggtacatcctgccccagggcctttgcacttacccttggcctcagtgctccttccccagaaagccatatggctttctcccaagttccttttggtctctgtgcaaaactgaccttctcagtgaattctaccctgatccctcctttaaaattacaaaacagggaggaactttatcctgttttatttttctccatagcacttatcattggctgcattcacttctctgtaagatatttttgttttgttttgttttcatttttattgagactgagtctcactttgccacccaggctggagtgcagtggcgcgatctcggttcactgcaacctccgcctcccaggttcaagtgattctcctgcctcagcctccccagtagctggattacaggtgtgtgccaccacacctggctaatttttgtatttttagtagagacagggtttcaccatgttggccaggctggtcttgaattcatgacctcaagtgatccgcccaccttggcctcccaaagtgctgggattacaggcatgagccactgcacccggcccactgtaaaatattttaatcccctggactgtcagctccaagagggcaagggtttttccctgtcttgttccctgtggcatccccagcacctagcacacagtaaatatccagcaaatttttgctgaatgaatggaaaacctgtttgcctatcttgacccgggcctggggaaataagtggaagggtccaccctaggccctaagcacttggccaggaaagctgcaggagaggagtgcatggcatccgagagccatcaaacagtaaataagaaagactttctttttctccatattatgattccaccagttgctgtgaacatatgctatttttataacttttgaacacacattaaataaaacaaaaaagcaaagatgtaagtcagactcagaggagcagtgtggaggggaggggagacaacgcaaagagagagggacccaggccacgccaaacaaccgcctggctctctcctccctcagaagaacccatccctgccccgcatccagtgcagcaagcgtcctgggaaggtcaggctgtggctcatgaaagacactacagagtagatgctaacccaaatccgaacactcccagactctccctcccacccagctcagctggtactagaggcagacaacgaaaagctggcagaacaagacaaatggtggagaaagtaaggtctgaagaaggtggggtgggtagaaagcagcaaaaaggaatgagggttggtccagggggccaggccccagctcagcctcctagtcactgagtcagcttgggcaagggtgctctaacctctgagcctctggttcttcctccctaaaagtcaaaataaaggtatctgccttgccccagtgggctggatgtatacgatactgctttatcatgctgtacaaatatcattagaaagagaatcagcagcgtggatgcctcactggataatgcaaaaccccgccccacacggagccttggtttcctctattgtgttttccaattatttgctgttggtctatcaaaaatgcatttaatatgcattttaatatctgacctttggccacctggctcaactctgttgcttctaataatttatacattcggagtctacgatttcctccagccagatgatggctgcaccagaaaataatgatgccttcatctcttcctttccaagacttatgtctctattggttttctcttgtggtattgcgctggctctgacctagggtgcaaggttgaataagagaggtgatagtgggcgttcttgtcttctttttaacctgaagggattgcatctcatgtctatctatcaggaataaggtttgctagagatttcagtagctatctgtcttcagattaagtaagttcccactgcgcagagttgacgatgtgtgatcatgaagcacctactggatcatattgaatgtcatttcagcaattagagagatcattacatgattgttctcctttgttttaatagaggtctgcaaaacaaggggatgcctctacccaatactgcctttcagggtcaggaggaacaaggcctgggacccggaagataatgacaccactcccacctcagccgccagcctgagcccctgatggtccgtcctcctgtgtgccacccctcctctcctcaactctgtagctctctgggccaatctccttcacctccatcctgaactctcactagtccttaaaatgccacagacttgtccctgtgtgaagtcacaagagaaagctcactgccaaccatctccatgtcacaagaagtcaccctgagcatacgctgtgggaagcaggctgatcgcatcattttttcaggatgagcagttcaggattctgatgcaaagactccacatccaccttggcacatgctaagattcacatgaagctattccaaaatggaacaacatacctaggaggcagtgagctccctgctaccaaagatgagaatgtccccatgacatttgctacagaggtatttctacaaaagatgaagagtgacccagagtcatctgtaaaatgaaggtaatcagacctatcaaaaggtaatggaggaggaggaggtggcagcctagtggggagagcaggaggtgggatggactgacattccaagcacctgacatacacctcgtcacttagtcctcacagcagcccctgtggctatcaggacacagagaagttgctacaaaacacacacacagaggccgggcacagtggcttatgcctataattccagaactttgggatgccaaggcaggtggatcacctgaggtcggcagtttgagaccagcctgaccaacatggagaaaccccatctctactaaaaatacaaaattagccgggcttggtggcacatgcctgtaatcccagctactcaggaggctgaggcaggagaatcgcttgaacccaggaggagaggttgcggtgagctgaggtcacgccattgcactgcagcctgggtgacagagcgaaactccatctcaaacacacacacacacacacatgcacacacacatatgcgcacatgcacacacacacatacacagacacaccttgttcaaggtcacatagtcagtaggtgacagcgcccaggcatgcaccaagggcttctgttccagtccttaagctcactccactccaccactccccctcccaggctccagggtatgcttgtcaaactgcctaacacagtgacagccacataatgggcacttaatgattctccccagattcagatggtcagacatccctcccactgagcaaagtcaattttctcatctgcgaagcaaaagagagacttcatcttggcccttcacaggcaggaaggtctgactgcctggcttttacggtcagcccttgccacctttgcaaaatgtattcagaaacatgatctcctttgagcttcacacctctaagaggcagggtctcggcagagaaggtcactggggctcacgtggggaaggttctgcctgaggtcccatgctgaactagcacactcacatccagggacatcagccacctttactatctccaccccaaagcctcatgagtgaaaaggacggacgatctctaagatgtcatgaaaacacggagatacaattgaacctatcttcaaacccaaatgtgtgccattgactaatgtgtgatgtccactctctaaatggtgaagtgaagaagcagtcagcataagattccgccaatcaagcacaaataacaccatcgccttagactcggaccatgtgatgacctttatacccgtggattacatattgactctcctttcataatctaggcaccaaaatatctgctggcagcttattcccatcagctgcaggacaaagtagcttctgcatttggttccaagacaggagtcagcaagacactggaggccacagtccaatcccaatggtctgtttattgtctgaggtcattaccatggtgtctcctctccccgggccctggtaagcaccaaggccactttatttgtcagtgactcaaccaggaaccacatggacttcaaggcaacctcctggccctcaaggacacagagtagctaagccaaggatacagcaaattttttggaccaagagccaaagcaggtggcgcagactctgctaatgatcagatccaggcagtacagagttctgagcaagggatatagcaggagtccagctccagctcccttgatttcgagaagagccacaccacctaagaaactcaccttgctcctcatcaaaactgccctattctaaatggcactgagaatgagactgtcctttatacttttcaccatcccagttggtgggaggggtcttttgaatgtattcccacttgtgagggacacaaaactcaccaatgcctgacagcaaaatctgggggcaggcttcccaggtctcccatgtctgccctggcactgaagcctggtttgggggagacggggatgcgcttgtgataatgccaactcttcaggttctgagcactctcatgtctgtcatagaataggataggggttcactattgtagcatgacacgggctcagaaaggccacctattgtatgagcacatttagatggaatggccacaaggggcaaatccgtacagacagacagcagttcagtagcgtctgaggctggggaaggaggggtgtggggagtgactgctcatgggtatggggtttgtttcttttaggttgatgaaaatgttctggaattaaataatagcaatgattgcacaactctctgtatatactaaaaaccactgcaaatgagtaaattttatagcatgtgagtgatacctcaataaagctcggtttttaaaatttgatggtgtagaagaatatggaggtagcacactaggaggtgcttccctgccccacaagctgtctgtcatttgtcacctgggcactgggcacatatcagtcctacctagcagcccttgcaatcctaccataggagaccagcaccccacacgggcatttgttcagccctccagcagcccctcctgccagccaaccaccctcatccctcccgtggatttcggggttctgagtaaccaaagcaagcatgggaacattctcagagcatgtccaggggacacctccgggaatatgcattcatctcagaggggagctgagtgcttatttgacaagcacaatgtaaccaagccaagaatggggaagggtatgaaacaagagaggcggccctcttccttctcagggaagccggggctggcaggaagtggggctgcaagtccaacagctgacaccatcgtctatgttcctctgagctgtgtgcaaggaagagtacagtctggggctgcaggcatgacagacttcagagggaaacaaatcaggcataaaaactgctagaggttccattagcaagacagagcaaaaaataggattcccacatcccccctggtgccctcagggctccttgtaccactaaaaataaagcaacaggcaatggtgtttttaatgccagcgttcgcaggacttcctgcagagtcaggcttgcacagcttccttcggtcccccccacccatctccaccccctcagccatggatttctgcagcaccaggggccagcaaggagcccaggactgaatgagatgcgtccatggatcatgaggctgagatagatttccctctgttgtcccacttcaaggatgcagtctggagcttgcaatccaaacagggagacaggttctgtgtcccttcaggagaacagggtctgagcatttgtgtcataagcagggaaggagagggacctcagatccagtccatgattggacacacctccctctaacctctggcatcctggcaggcatctgggaggaggagttagaagaggaaacagctggggccgtaagtcaggcgagttcacacccaaccacctgccccattacacagcagaaagcacctcccttactccttccacagcccacaccccacaacccagcccccagggctgcccagtactagctcttgacagaggactctagtctctcagatcaagaacagccctcagaaaggcaatatggctctcagtgattctaagtgcagacactggcattgggctgcctgattcaaatcctgcctctgccacttgctacatgtgtggccttagacaagttacttaacctcagttcccctacctgcaacatgaggttaatgacatttcctgcctccaggactaatgtgaattgctcacaacggtgcctgacacataaaggtgtgtgataaaggccagatattactggggaccaactaacactatctttcctagggagccactggcatctgaggctggcagccttctcttgattctccaggttgccctgtgtgcagcaggatgccaacttgtcctggccccgaggaagtgaatgctaggagttgctcctctagtctaggtgacaatcaagtcagttcagtggtagggacaggattcaaaccaagctttgtctgaccctaagcccatggctttcactaccattctacactaaactatcacctgcaaaacccacagtgggcataaaaagcctcttttgtcaaggacagtgagggacatagtaacagaaactgaaagagaagaaaaaaagaagtctcaagaaaaaacaatcagcaggcatgatatttattttagtttttaaaagttgttggccaggcacagtggctcacttctataatcccagtactttgggaggctgaggcaggaggatcacttgaggccagcagttcaagaccagcctgggcaacagaatgagacctcatttctacccccaaaaaatttacttaattaaaaaaaattagctgggcatggtggtgtgcacctatgtcgcttgaactcaggaggtggaggctacagtgagctatgattgcaccactgcactccagcctgcacaacagagcaaaaccccatcccccgccccccaaaaaaaagagttgcctaattcttcatctcaggtcccttttagaaaaacttatgtcatatcccataaaccaggctatcattccttcctaaagattagtagacctaagtaggcaactagaaaaacaacacatccgtctgaggtctcaggctcacctggaaatgcaggtcctggcctccctgcctccaccctcccccaccccttccttgtcaggcagcttgggccacccaccatatgccgctgcagcccataaagactctggaacatttcaaaggccttggcccccatcaggtgtggctccaaaaaacacagggtcacctataaaaggttgagcacaaggaaacagccataaaacccgcagtcctaacagcagacacccagtggccagaacaaagcagccagctgccgggctttccaggaaccacagagggacatccctcccaaggaccgcgcccagccgcagcccaggggcacatggctgaaaggtcctcagaggccacctggtaagaagggccctgtgttgggtgcttgctagttgccagggactgtcccggatgccctccttgaagagggttaaggaggtaacacaggaaagagctggcatggtgcctgcagccctgagggcctctaaaagagatgcttcatctttcctgagcttcaaagcacccggcaagtgggacgtgattcccatcttttaggcggcaaaactgaggccctgaggagtaacacaactaggaagtgagcttcaagccaagtctgtctgttcatctcatgctttctcgtgggttcctggagaggtcagatgatgggctgtcagtgctcaaaggggcctggagacctcccagccctctgctgggtaccctccctacacagtgcagccaggcttccaaggcagcctccctcctctgctgggacagtcgtcaggggtgtttcagaaggagcaagccccgagcagcctccccacactctggcccagttgagggaggtgacagggcgccatctcctgctccctttctggaaagctttcccacatcccaggccaggccctgcaggccctcaggctggctgatacatggcaatgacaacagaaatggctcacacttggtaggtgcttcctaactgccacatcctttacacacaactgcacaaatgctctacatcagggatgcccatgttatagaaaactaggacttatggaggatgtgcaacttccccaaggtcatgcagctatcagcagccgagctggaactgaatccatggtcctcaccatgccacgctaccctgcttctgcctgaacgcaagcaggtgcagataagccgcaacacccatgactatacccacacactaccatcttcccagccgcatggcagtgctgcggcctagacccatggctcaggctctgccatccacccttggtgcagccctccagcctcccagacacccctgcatcagcctctctctaggtaacagataatactgctgaaataccaggctggctttaagttttgggtcccactgtcccactgtcctaagtcccactctgacctgtgggactaaaaggagggatgggacaatcattgctgtacaagcagctcctccagagaaatgcccagacccagagcagcaacccctcatggccctcaaaaaggcatctttggccaggcacagtggctcacacctgtaatcccagtgctttgggaggccaagaggggacgatcgcttgaggctgggagttcaagaccccatctctacaaaataattaaaaaattagctgggcacagtagtgcgcacctgtagtcctagctacttgggaggctgatgtgggaggatcacttgagctcaggagttcaaggctgcagtaagttatgaccatgccactgcactctagcctgggcaacagagtgagactatctcttaaagaaaagaaaaaaggcaccccttcctagagtccagaaagacgtctgtatctggcagtgcccgtcttcctaagtcctttctgagggtcctgagctgaggggagccaaggatgcagcttcactccatcactgggtggtctcctctgggaacttggagtattcccttcctgcagcaggaagagccaccaagagtttatcgtgttcagtccttttagtcacctaatgcccacaggcaccttgacaccatacaaagaacccctctggggaagccaacaaccccaaaacccgtgcaacccttgcaccctctgcagccagcccttggtagtggccttactgtactctccctctccatgactcagtttgcctccaataagccctggggcctcaagttcagactcacccaactagacagaccagaagtgagcctctgccctgacatcttcaggcactcttttgtcaactactcacaaggatttatcagataggaagggaaaaggacagaaagaactgtgggataaggaaggctctgaatgtcagaaaagggtctgagtaggatgatttgagactgaagaagctacgtggtatcacttaggagcaataaaggaaagattagggcaggtgaggaggataatggacagtggagcctggccagtgccagctgacggactagaccgatcttcctacctctgcttgcaaaaggcattgcttcctgcttagcatgcctcactgattcccataaaaatggcattcatctatatgctgaggtgggctgaatcatggccctagaagatgtccacgtcctcatccctggaatctgtgactgcgaccttaactggcacaagggactctacagacataatttaattaaggaccttgagatgaagagattagcctggatcatccaggtgggccctaaatgcaatcacaaaggtccttcaaagagggaggtagagggagatttgacacagaagagaaagtaagagatgtgatgatggaaactgagatggagcaatgtgctttggatacggagcagaaagccacaagactggggatgcaggtggctactggaagctgcaaaaggcaagaaaaacgacttgcccctcagagcctccagaaggaaccagccctgcagacgctttgactttaaaagcccagggaaactgatttccgacttctcgccttcagaactgtaggagtatatttgtgttatcttaaggcactatgtttgtggtcgttacagcagcaagggaaaactgacacccacactcagccactcgagaggtcccttctcctgctcaacactgctagccattaggggttaagtaattcacaaaagagacccatccctgccttcccgtaacatattgtcatcctctttcctccatcctctttcctagggtccctgtggcctggactatgctgctttctgcctaagtcctccccgtccttccagctctcattccttccatgaagctttgttccagcctcagagtcttcaaagacaccattcctctgcacgtccccctgcacccacccctggctaatgcctcttcatcctgtagatctcatttcttttttttggagacagggtctcactctgttgcccaggtaggagtgcaatgatacaatcttggttcactgcaacctccacctcccaggctcaagcaatcatcccatctcagcctcaagagtagctgggactacggggatgtgccaccacgcctggctaattttttgtatttttcgtagagatggagttttgccatgttgcccaggctggtctcaaactcctgggctcaagcgatccacccgccttgacctctgaaagtgctggggttacagtcatgagtcaccatgccgggcctgtaggtctcatttctgcagggaagccttccctgagccccggccaaggagaggatgcacccccacacacacacgcattatagtccatagtctctcatcacactccaggctgaagtgtgcatatacgtgtgtaagaggggattatctgttcaatctagtcactgatgatggaattgctcagacctctgagggcagggaccttggttgtcctgttcaccagtgaatcaactctcagcctgttatagacacttgcattgatctccctctgcccagaactgctttatttaacatctctatcaaaaagaaccgttgcatagacatttttccaaggaaggcatacaaatggcccacaggtatataaaaaggtgctcaacatcactaatcatcagggctacacaatcaaagccacgatgagttataacctcacacctgttaaaatggctataagcaaaaaaagagagagagagagagcaagtgctggtgtgggtataaagaaaagagaaccctgttacactgttggtgggactgtaaattgataaagtcattatggaaaacagtatggaggttcctcagaaaaatcaaaaatagaactaccatatgatccagcaatctcactactggttatatatccaaaggaaatgaaatcagtacgtcaaagagatgtctgcattccaatgttcacagcagcattattcacaatagccaagaaatcgaacctatctaagtgcccaccaacggatgatggataaagaaattgtggtacatgtacacagtggaacactattcagcctttaaaaaagaaggatatcctgccatttccaacaacatggatgaacctagaggacagtatgttaagtgaaataagccagggataggaagacaaatactacgtgatctaatttatatgtggactcttaaaaagttgagctcataggagcagaaagcagaacagtggttaccaggggctgggatgggagaggaatgctggtcaaagagtacaaactttcagttaaacaggaggaataaattcaagacatctattactgtacatcatggtgataacaattaataacaatgtattgtattcttgaaaactgctaagaaaagagattttcagtgttctcaccacaaaaaataggtatatgagataatgcatacgataattagctcaattcagccattccacaatgtatacatatttcaaaacaacatgttgtatacaataaacaagtacaatttttatttatccagagaaaattttaataataagtgttcattttaaaaaaaaaaatacagccaattggcactctcaggcctgcgtcaggaacaagaggaagtcagggctcaagtttcaaaaacacagactgaaaataaagccccaaacatactcaaggatggaactccccacagcctgtcagcagtggacaaaaccttccatagcagaagctgcaagtaaaagatgtctgtgtgggaggaaccatttagaaaaagcagtaacaaggcgatgaaaacagaaacaaggcggccagtcacccaccatccccaattcgcccaaaggccaggtcaccctgttcccaccctgcaccagctgctcctctgcctgcggctttctggcccaaatcctgtgtggccctcactttctcctcagtcctgcctctgccatatgaccatctcctcctcaaaagaggcttctctggctacccaccaaagcagcccctctaacacacacaatcccatcccctgttcagtggtctcatggtgccactgtaaattatctcattcattgatttactgaagtgttgattatctgcaccccccaccacacacactgaaacccaacccagccctttctgttgcagtttcccagggcttcagacagtccttggcacatagagggtgccggagaatccagaatgaccctcactgtgcatatccatagctgccctcactgagccgcagcctcgggctgccccaaaaggtaagcggagtacaagggtggaggctctctctctctctagcacagaatctctttcttccagagtcggccagcggtgctgtctcttttctgctgggaaagataggaatggagattccttgaggtcagacacagtagatcctagtcagaaactcccattggctaagtgagagaagccagacacaaaaggccacatattgtgtgattccacttatatgaagtgtccagatcaggcacatccagagagcccacacagagtagaccagccagggactgggagcagagggaatagggagtgactgcttaatggtacaggacttccttttggagtgatgaaaatgtagataataatgatggttacacaactttgcgaataagctaaaaaactaccgaactgtatgtacactttaaaagaaggaattttatctcaattaaaaaaacaaaaaagcacttattgaaaaatgccatggagtggttagcagagcaaagctctggagtccaactgtccaggctcaattcctggcttaagccatgagctatgtgaactgagccaaattacttggcctctctgtgcctctgcttccttgtctgtaaatgggggtgataatcatgccaatttcacagggatgctatgaggattaaatgcaaccacccatgtgtaggggactttggctaactcctttccaaacttccaccttccccattccttgcagaccttgttttccatttgagatccataaggttctgaggatactgacaataatccctggcttcagccagttcagttacagcaactctcagaacctgtgctaggaatgctggtgcaaaggtgatttatttcctgacaaggttgagcagatcagcatgtgccctccagagctgcagcagccatgtgtgaacccagaggcaaaccagcctcaggacaaggccaactgtaaggagagcagattagagtgacagaaagaaactgggtccatggagacatcgttgagccaccggatcaaggctcatctgaagtcatccacctttccaactatatgagtcaatggagtccctttaatgttaagcccattgaagtgagcatttctgctacatgcaatcaaaagcttatcactgattcagctacgtaaagtccctcatacccagcccggcacatagcgagttctccattaagtgtgacttattatcatttttttttccaagcttctctgctgttccccaaggccagtgttcacccagatgtctagatacagaaactgttctactggtttatctagatccaatcctatgtccctgtaatggcaagccacagacaactttaccaaaaacccttgctgtgtgcaaaatcagtgcacacagcaagcattcatggggcgaggtactgtgtgctcagacaagactaggtacgcaggggacagcacatcagggaaggacaaggcactctgatcataagtccaaagaggagttcataatctaatcagcaaggcaagatcaaggtccacaaaacagtaaagtatatatttgactagtgacatgatttaagaaatgcaacagtgcaagctaaaggagtccagagaagaaagagatgggaatcctggtggcattctggtttctcctggctcccaatgctcccaacacatggacctaaccagatccaaaaacatcctcccaagaacatatggaggccacaggacatcagagcccagcaccagaccttgctcctgcaaatcccaaagataatgtgcacatttcacggacatggccaaagacccaggcacattctaggtcatggtcacgaaactggctgaactagtcaagaagtcctatcatcttttcttctcccaatttattttctttttccctctttttctcccaatgcagtaaaaatgtgatgcatgaaacaattattcttcagaactcaggggcaggtggggagcctcaaatctggagaaagcaaaatgtaaatgatgcaaaaagagatcaagatccatgaatattcatcttcctctcccttctggtggaaactagatttggaggggttcattgcgctccatttcctctgaattcctaggagcgcttgtggtcggcatctcctcattctgcctgaagaccacatgcaactcatagggctcttgcctccaagaacaggcggctgcacaggcgcatacattgtaccaacctgtacaccttatgtctgtgcatgccctacatgtatgttagacttcaattttaaaaaatgaaagtcaaaagactggtcaattccttctggtcctcaaggcatatttccaatgtgggggtaccttcctctcttcacttcacggtggaggatgattctctactctacctcctcacctccctgacacacctccttgccccaaaacaaaacagtgaaaatgaacaatcccctctaagccatttgcttatggaagacaaagctggagctgactcctttctggattctctctccctactccccccacccccactgagcacaggcatgcaatagatgctcaataactgtttattttgggaataaattacaaatggtatggaactatctcacacacaataagtctgtaagttcctggatgtctgagcttgtcttctacctcttgggatgcctgtgtggccctccccaaaaccccaccaccaggtgatttcttaacctctatgagtctcagctcctgaaccacacttgtccttcaggatcactgtgagaattttaccagctaagatgtaaagtggccagctcagaatgtgatatattgtaagccctcaataaatagtagctccctggacccaaccttcccccacaaccttccccagttgcagcacagagtttaaaacctcccaggagccccataaactgtggccgaccaggactgaccagcttcagctctgggtgctctgtgcctctctccaatacacacagtgcttcattaaagaactcaaagcttatctggcccaaaagcaatgcttttatctaaaatcagaccacatgggcaacaagtgaagcaggaagcctatcaaggcatttgggccaactggttttggctgccaagggagccctccttataggaggcggttcagaccgcaggccggctcacatacaacactggtgtacacggaggggttaattagcagtaaacagatgccatgattcacctctgtgctgttatttccccgtgtgcagctaaaactataatcactctgttctccgacaggatgtttgcgttcaagccaaaactgcctcctctatccaacttgctgcagttcggttcagcacagggcaatgaggaacttggctcctctcacgatagctggtggctggcctgacagaggccccttcagacagggaaggaaagaggagatggatggggtagagaagaaaaaaatgaatttgtcattttatcaaacacaggtgaaggctgtctgctggtgggaactgctcctcaacacttaacacccacagagctcacaaaataccctttcttctgaggcagtcaggcatgagaggcttcaggagccctgtgacaagtcattggcaagaaggagctggggcaaatttgcaggccaatgcctgggtcacaccctccctaccactgcccaggcctgggtgggtgtctagtctacttggagcctgggacctggtaaaggtggcctgaaaggctcaacctcagcttccagaaaaaattaaataccctgagagagccagaaaacaaagagattcagtgcccaaaatataaatgtaaccagtgtggagtattagtcaattcatcagcaagaggttactgaatgctcgtttgttcattcattcgcccaccatctaccaaatgcccaccagagacatgccacgtgtttggtgctgggaatacagaaagaaatgaagaagatgtatgtcctgtctcagtggcccacagaccagagtgtgccaaatcctgaaggatccagttaggagcttacaatctagctggaaagctaaagaagggaagcatgcggaattctccggggctcatcgccatccctcacctaaccagtgctttgtgtaagatagactcaaaggtgagcttgaataaactgacttctgctaaatgccattattctacctggatacatcacaaaaatgggagccattacctactgagtatttttcatgtgctaggtggaactttctctgtggtcttcaccctacatgtaatggaaactgaggcatgaggagggtagacaacttgcccaagaccacacaggggaggcaagagaggaacccaggtccttgcaccccaaccccatgccctttccacctcactgcatgagcagaggaaggagcccccttgtccatccctcacccagccccagctcagcttgggctcccccaagcaagcaccacatgactgacactcttggaatcctcttcataacctggcccaggtatgggacaagttgccaatgagcaacatatttgcttaaccaaatgcctgtggcagaataagcttgagataaaagggagtgtgaagtggaaagaagacccggaagtcttcatgaaggaacttggtgtacagaaagatgttttgggtgcctcagaacacataatccctgatagagaaaagagtctggagacaaataccagatgttaagcaaccttaacacaggcgcctgggctgcctcagcctatcagagtagcacaggttcctaaataggggaaagtgccaactaaaaagcccaccaggcaggagggctgggtctggagcctggcctttcttctttgttcagagcccaaaaggtgcctctggtccattcaccattcaccaggccccagagcagccccaggatcaccagatgggtccaccaggtccgtcctgctctggctaccaggcttctaagcctcttttcagaccctcagccttctgggagaaaccattccatgccctccagcactttccaccccttctgttccttttgacatcatctccaactgcctgaggctgcagaaggtgggtggtgtaggggcagaacaggcaggagcacaatcacaattcttataaaaatgcaagggactgctggagccaccagggaccctcagaatggcctcatccaatcctccgttttacaggtggcaaactgaggcctcgcccctgagttaaccctttcaatgcctgacatctcgtactgcaaaattcttcctttcctctctctccattcccctctccctcgtccttcctatagtggtataggggtgtgccgtgggtgatgagaggcagagggaagggagcatttctcaccccattttcctccaaccctactttctgcctccatctttagcactacctcactgtccgtcttggtgctcactgttggcccctggctaccctgccccttccagtggtctcctgtccctcagttcagcacaatcctggttatattgacaaaggagagggatctaaaataaaggccaacttcatcataacagggccatttattgaggacttacaagatgctaaatgctattatactcacaaaacctttacgtggctggtatttttagtattcacagtttaccaatgaagaaagtgagctttgcaaggttaagtaaattggccacaaccaccaagctaatgcaaggtagagccaggactcaaacccgcctttgaccaattccaaactaggctaagagcctcacaagactgaatttaagagaccaaaatgaacattcaaaatgttgcactgtggatgcaaagatggaaggcacagagtcctaggcttcagagatgctacattccagcagggggtggacattccacagacgtgcaatccaacctggatggactagagtggagacttaccagaaacagagtgaccaatgacctaggaggttattgtcaatgcccacattaggggaaaatgtcacagtctcccaaagatgaccaaatgaaagtaacagtaataactaacactttcctagcccttggtttgtagcaagtgctaccctcagcatttaacacatgatcctcccaacaaccccaggcagcaggaggataatgtggggtgacatctcccagcatttgaaagtcaatttgaagaccgggtgcagtggcacatgcctgtaatcccagcactttgggaggctgaggcgggtggatcacttgagatcaggagttcgagaccagcctggccaacatggtgaaaccccgtctctactaaaaatacagaaattagccggacatggtggtgcgcacctgtaatcccagctactcgggaggctgaggcaagagaatcacttgaacctgataggtggaggttgcagtgagccgagactgcaccactgcactccagtctgggcacgagagtgaagctccatctcaaaaaaaaaaaaaagccaatttgatactaggaactgtttgagggcgttttcagtattattttattcccactttccaagtgagtgaactgaggcatgcagaggtgaagtggcttgcccaagatccaaaggtcagcaagcaacacaactatgatttaagcctgagtaggctggctccagagggcatgtccctgatgaccacactgaactatctagaatgagagacgttgctcattgagacattacaattctggtccattggattttagaaaggcaaccgtattacttatgttactactcacgtttgagaccctgttttctcagcagtgaactgttgaacttactttgctgagacataaaattggacatgggtagaaggggctacagtgaagtgcatttccaaggtgaagcacatcaccacaggagtgagacaagaaacccgggaagcagcctctgtcatccatgagccttccactctcaatgctccaggcaaagagccacgccaggtaagattcaaagtgggagagggcagactgggagatgatgcattcaaatcatgagggcaggctcaggtaactactgtcaattcaccacccctgaattagggccaacgtaaaccagtgacaatctctttgaaacatgaagcagggaggcagttatgccccttagtccctttatcctgaaggtgtttaagaagctgagtagctttcaagctgcagacagggataagaagaggcagagctgaaggcactccagagcagcataggaagagggtaagagttaacaatctgaagacagaaaaccctgggttctaatgctggtactgccacttattaaggatgcctcttgggcaagtgacatcacatagccattgcaagccccagtttttgtacatctgtaaaatgggaaaaatacagatagtatctacatcataggctgatttagaggattgagataatgcatataaagtgcttgacaccatgtctgacacctagcaaatacccagtaaacattcagttttctcattgggtcatgataatggttctggcagagccagctatggacagcagaagccctcagtgtgggactcgggagccccttcagcagtccaggtgttctccaaatctatttcaatctcctgggtgcagtgctacatttcccaggatcccttgcagttaaaataccatgtgatcaagttctggccaatgaactgtgtgggtagacgtgatgtgaatgacttccataactacccctacaaaactacccctcatgatccttacttctcatcccctatcatccggacagatgcagagggtccagcagagaccttcaggggcccctagaagatttcaggtccacaagtgaaaggagccggggtctttaatgactgtctgaagtgtgtcttcactgcaccctccacacacaccatcaatggtactttgtatgagcaatacgtaaacttctgctgtattaagtcattgacatgttgacctcttgttacagaggtggcctagctgactaatacacagtttatcaaacctcaagatggactcacaggtccctgttgcctcaatgattccatcgccactgcacacaccagagtctagataccataaatatggtccaggagagaaaccagcagcgtggtgtggtaactggcaactggccaggtatggtaagcataaggtaaagcctgcagcaactcaagaaatgcagagggaagactactcgtctagaagaaacaggatggcccagcagcaatattacctgtgctcatagctactggttcttcaggagaacaggaaagagcatggtctcaaaggccaagcatatcagaggccatatctgcctgggatctacccagaaaagtgactgaactgctctgggcttcagtttccacaactgccaatcatggataacaataccctatgttctgtgacatcacactggtatcttcaaaccagccagggcaggaatatttataccataggaattgacgaacaccgtacatagggactttcttctctagaaatcccgttgttaatcacttaccagcacatccctggataaacaggagtcagctaagtggaaggggagaaggaggacaagaaaagagaagtccggcagtgtgaacagcatgtgtgaaggcccagaggtaaaaatcaaaaggtttaacgaaatgaaggaagtcctaagtggctgggtgtggagagcttgggaagatgttaagaggaacctagaaagagggcaggagctggaccttgtgaaaggacttcactaaatagtaattatttgttccagtcatccatggctatgtaacaaattaccccaaaatgtagtggcttaaaacaatcatttcattttgtttatgacttttaagtaaggaattcatagagggatcagctggtgggttcatctccaatctatgtcaactggggttggaggatccacttccatgatggcatcttcacacatatgcgtggtgccccagtagtgtctctctgtctgtctgtctctctctctctctctctctctctctctctcgtatgcccacgcacatgcttcctctcactctcgctcttccccctgtagtggccaacttccctaagaagtagcattcccagataacaaatgaactgccagggttcttccaacatagcctcagaagtcacatagcatcatttccaccacaatccatgggttacaagcaacccatggattacaggggctagctctgccccaaagggtacaacccaagaggatgaacgtgaggagtcgtggttcactgagggcctgctttgatgaccagccaccacattgagcgacccctggtcactgccctctaggaccacctgccaggcacagatccagaaagaaaccaggaccagccctgtccacaaggagctgtctgcagaggagacaggatgcctgtatagaaaatagggctgcagcatcagacggctgctccccacccaggatggaaggacaaacagagaggacgcatcagggaagggagaggcagagaaagctgactagggtaggtagagaaggcttcccaggaaggcggcattcccagcaagatgagctaagacttggaggatggaggaggtggagggttggaagggaaggagtaggccatcactggggccacccccagccttctatcacatttggatcactatggaccacgccaggtcatctccgcttttcccagcagggatgttgatcagacctgggcactctgcagtgatgatcagcagctcaagagcaagggtggctcctgaccgtgaggggtcagcaccaggcccacaagcctgtctgttgcaccagtgcccaggaggggctgtcgactgcagaactgttttctctggctcgacctcacccagaaccagcggcagaaaggccagttatgcaaccatcctcaccacagcctgccagcctcagaggctgggcctggccgccgggcctggccgccaggcctggtaaggagactgctgtggcctgcacagcacaaggccatcctgggccccaactgccactttccatgcaggtgcaagacgctctgctgacaaatacctggggaaagcaggagctgtgggagggaggtaaaaatagcacagttggcaacagagaaggcttttctaagtcctcagggtcctattagtccttgtccatgggatacacatgagctggcactgagcattctctcttctccaaggctcatgcttagaacaggcacagaggcctgggaggcctcttgtatcatgtcaggagctgcacagtgatcagaagttagggagagcgcctgttgcagaggctggatttggaggatatgctggggctgccgtcataaccccacatccccagtgggttctctctggccactccctctacggccagttctgttttctccccatttttggaaacccaaattcttgatgtttctgttattcacattgccattaagaattatgggctttgcactgtgtttttaatttgttgtgtaagggttttacacaaacacagctagatgcctagaaaagacaatgtatatgggcatgcaggctgtgcactgcacaactccagagggcttcattcatgaccaggatgtgagtggcgccctggaatcatgcaatgtggttaccggtattgccagagaggaaatgatgtcttacatgaccccatatccccgggaaaaggccagccatgctaataaagatttgctaactaaccaatttgtctcctgcttccaaatattccatgcacggggtttggcaggcacacggccacaatgcgcaatggcctagaaagagagccatattgaaatataataatgtatttccaggccacggaggtggagaggcacaaggaattgatctttctaaggcaaggaagattcataaccactgaatgagttaaccactaccttcttctgagtgtgcagattaaattctctgtcgcaccaacatccaagtgcgctaaattttaacagacctggaatttggatatatttatttctctttcacagaattcccattcttttactaacacagtttcagagtttgagatatgagcatatctcatgtgggataataaggcatcattccacaccaggttgcacaggcccatggtttaatgatgagacttcgctggtgggtgcaaactttgctggtcccccatgctctcttgaatctgtgtgcatctcacacatacgtacatgtacacacacacacacacacacacacccctctctcaagtttttaaaaacctacttaaattctgcatcctacctccaatatactctgtgtacagtgtaagtgttaataccaaaaatagtgtttttctgctgggcacagtggctcacgcctgtaattccagcactttgggggccgaggcaggtggaccacttgagctcaagagttagagaccagcctgggcaacatggcgaaactccatctccaccaaaaatacaaaaaattagccaggcatgatggtgcatgcctgtagtcacatgcctgcaagtcccagctactcaggaggctgaggtgggagattgcttgagcccaggaggtggaggttttagagaaaaatagtgtttttctccaaaacttcatggaagactgttgacactcagaaaaatgacccaatattgattctgtgcctccacataccccccagcacagagatgtggcacatgtgctgtggttcataaaatacatttatatgtcatctgatgtgaatctcatagcagtcctggagttgtacattgagtaacctgcatgactgtatatagcccactgcctgtcaggtagagaaaaggtgattatcccattttccagcaagaaaaactaagactcagggaatgtaatagaactagacaacatttaaggttccttctcatcctgggaattgacatacctgagaattcagtagtacaaaactctctgaacttgtcaagggacctcacatctctccaggaacaacacaccactcctcttttcagtcctgtctatgtcatcagagtttccctcacactgtggccaggaagagctaaggaggtataaatgaggtgtacagtgtgggattaggtgcatgggatccacagcccacctgcctggatttaaactggctctgctcctcacctgtgtgtgaccctgagcagttactcaacctctctgtgcctcagttttctaatccataagtgaggataataataccaccgaattcactgggttgttgtgaggattatataatacatatagtttaaaaacaaccagacacacagtaatcactcaaagtttgttatccaaaaaaagaaaaacattctcattctctatgcatccattttctaacctgtaaaatgggaatttaaaaggggactacatcacaggattgttttgaggattaaataacagaataaacataaggagcttaaaacaatgcttaatgcatagaagccactcaaacaagtttgttctgattttttttcccctaagaaaatagtaactccaattcccacagaaagacttcccaaaacaaaagtaccaataagtctgaaaataaatgcaagacctgaggaggaatcattgctgttttctaaaaccagtgatagacaggctatcttagagaccggaggttcttgctttacattcattttctgaggtcaggaagtaaaaaggaacatgggtgaacaggcactggtgagatgaggaagaaagaacaggaacatctcagttgctagtttctgttttcaccatgaaaatcattttaaagccctgcctagaatttaaatagcatcatccctggagatagctgttttagtttcattacagtctgtgttcgtagagtacaaatagaaaccttcgtgattttattagtttccatgcaacttaggagagatttgcatgataacatttcatctcctgactttaaaaagggaccaattaaaaatacagcacttgcattgcctgtcacgggaaaatgaaaaggttcacagagttttaaaaacctctgccatatctagtccatggtcataaatcaagtattcagtactacggtggcaatcactattgtctaaatttttagtttattttgtaagaagtacttggaacagctgggtgcagtggctcacacctgtaatcccagcactctgggaggccgaggcaggtggagtacttgagatcaggagttcaagaccagcctggccaacacggtaaaaccccatctctactaaaaatacaaaaaaaaaaaattagctgttcatgatggtgcatgtctgtaatcccagttacgtgggaggctgaggcaggagaattgcttgaacccaggagacaaaggttgaggtgagccgagatcgtgacactgcaccctagcctggacgacagaccaagactccgtctcaaaaaaaaaaaaagaaagaaagaatatttgcaggatgtttgcacccctgaaaagagttaaactatagtacagaagaaacaaaatgtacaagtaagtatttttgcctggattgcagcaagtcctacacaattaccaacaccccaaagctacctggtactctgtggatttgtgaagtgttaatgtaatgtatctgtgacaagttaaaatttaatgcatggctccggtagcataatcgaatcgatgttatgtaacctaagagaactattccagtaagttctgatgtgctggctgcttacggttcagggggagtttttttcggaggttactgagtatttaggaatcatcccttcagacacttgctcttttgccacagaagctgcagttatcttatccctgctttcggcagctggaatgctccgtggaacagggctgagatgaacgttctatctccaaggctgcgttttggggcaagttaaggaaaaggatcaaagtaagttgatttgcatgaccttctctttaatcagatgtttctttttatgttcaacctcaacaaagccagcctatcatagcacactatttatagtctataatctaagatgttctgaaccattcccccacaccaaaaattaaaattaaaacctcaatagtggtgtggctatatcattagaagtaatagtagagtcacaaaaacctatttctgagactttttttttaaatgacaggtttgatggtatttccaatggggcctgtgtccctagattgtaattcttaaatatgtcatcaaagtcaatattgaagttctggggacaagtcaatcaaatttcactcttgtgttttatagtagaacaagaacttctccctggattcactgccctcaataacttaatctttggttctttatcaggtaaaaatgatagttttaaaatctgacttaagaaatggctttatattgaaatcatgaaatcagagaatttgttatatgcatgagaaaactaaggcctggagcctatgacttgtctaagacactgtagctagtcacttgtcatatgtcaaaatcaaaaatccggcgctcccttaacttcactctaagagtagacaccattaaaccagaccccacaggcagaaagagggttgttctcttcatttgtctgctctcaatgtgggcagggcctacatcaaagtcagcctgggtgcttctagaggggctgcaatctttagaggaagaatatcagctgcccaccgagaaaacaagaacgccaccgtaaagaacatgtcagggaaggaaatgtgcccaaagataatgctggtcatctcctggagggggaatttggaggaatgtttttcccttttctcaaatgtttatttataattgtggtgaaatacacagaagacaaaaatgtaccatcttaggctgggcacagtggctcacgcctgtaatcccagcactttgggaggctgaggcgggcggatcacgagatcaggagatccagaccatggtgaaaccccgtctctactaaaaatacaaaaagttagctgggcgtggtggtgggcgcctgtagtcccagctactccggaggctgaggcaggagaatggcttgaacctgggaggcggagcttgcagtgagccgagatcatgccactgcactccagcctgggcgacagagcgagactctgccaaaaaaaaaagtaccatctcaaccatttttaagtgtgtagtacttcacacttaaaaatgtgcatgtttcacattgttgtgcatcccatctccagaactttttcatcttacaaaactgaaaccctatacccattaaacacttccctccctctggccctggaaactacccttctactttctgtttctatgagtttggcaactctatgtacctcatgtaagtggaagttatccttttgtgactggcttatttcatttggctgatgtcctcgatgttcatctatgtggtagcacgtgtcagacttgccttcctttttaaagttgaataatactctgttgtatgtacctaccacaattcgctaatctattcatctgtgaatgaacccttgaattgcttccacctttggccattgtaaataatgctgctgtgaacatgggtgtacaaatatctccttaagaccctgcttttaagttttttggatatctaaccagaagtggaattgctggattatatgataattgaatgattaatttgttttgagaaactgccatactgctttccaccgcatctgtaccactttgcattcccacaaacactgcacaagggttccaatttctccacatcctcaccaacactggtgattttctatttttttttttttacagtagccatcctaacagatgtgactgtgtcctttttgtttaatgcccctgcacggcctacgttttctacaatgaacatgtagtatatttgggattaaggacaaaatataaaatactgaagttaaaaagtaaatcctatggagaaaacagggttgtgaaagaacttaagaaatgattgggttttttttttttagactgaggcaaactgttgagccctcttgtgggctcagctagagacatcattcctatactcttcaagaatctaccacctgatcggctgtggctgccacaagccacaggagaaacggccataattcatgggcagctgaaataattcctctaagctctgggaggaaagtgttcccagatgcaggaaggagaacaacaatgtatattaagctgttgccagctaatgttggtcataaaaatccctagcacttgggtaaggcctttcatcttccaaatctttcctccaagccttagaacacttatctctgagttctccatttgaataactggaggcccatttttccccttccagagccacaaagggtccactttccaaaaccacataaagagaaaacaacgtcaatgtggcaacttctcccaaagaggagcagaattctgctcttggttaacaagcacacaaagaacatctcccacaaacccttccaacgcttcacctctgagccacacaggccgcgtgctatcagttcattccacagaatgtctcgtttgaagagctaaaattttccaaacgtgaactcattctacccactggtagaatgctttactccttggaggtgaagtcatttgacatgatttattcattaagacaaaggtgaggtaactaaaaccaaaatccatccaattagctatttatccaacctctaactctcagaggagaaattcttttttccttggtgtcaacctctccctctacctcctgccctccctcaccttcttcctttgtgtgttttgctctcttttcttttctggtttctttctgttcagcaaaataggggagatgacagcagaggcatacaggagccccagaggaaaggagacccaatgagcaggtgggaaagaaacagcctcctattctaagaagcggctgtattcaagtgatgcaaaaagaggttcaagagcactgtctgtctccctaggtgaaaaagagtcaacacctagaaaatggaatccaactcgagtttcctaacaaaggctctgtaccctacatccaaattcttggcagggcccccaaattacaacccccacgtgaaactgagaagggggctaaaccttggagatacaaggcacgtgacattgataaggaggtgaatttatggcccagcaacagtcaaaagcctccagtcacagctgctgacaagaccgaagagacctcagaaggcaaacttcaagaaacaaccagaatgggtcgttttctgaactctgggcaaaggggcaaagggaaaccacactgtctcaggaggacgaagaacccagggaagccatcagggagaaaaataaagtggccttcatggaggaaacacaagttaaggttaaggtcattctacgtctcaacactgcggacatggaaacaccacccagctctgtcccttcctgaactggatttagaatttgaaatctaccatccaccaaggcttgttctgcatgtcccagacacagactagaagcaaacaaggactagtgcaaacagaaagatctttccaagttcatcgtaaggtgggtttgtccccagtggaatagtggcctcaggagatcataaacacactggtagggtgggcttccagcactggggaggaatcgcacagggcctgaggccccaaagcttccttccaccactgtgaatttatagttccatgcgcttctgcacttgttaaatcaggtcgctatttgttgtctactaatctacaaacctgaagcccccagccagcagaggccactctcgatcccaccccccagccccagttcactcccaaagatgaagacagagaggactgtccagtctctaaaagggaagaaggagcaagaacaagacatggaaccagaaaataaaataaatactcatcttatactcccaacttgaaatgcacatacaggcagcccaacagcctgtagataatttggtttacaatgatatgcaaagatgcagacccatcgtggctgaatagtttcgtacagttagaagtgaccctggaaagaatattactgacagtcttgccttaaaaactcttttgcaaaagacatcatggtcccagacttcagcagttaacagatggaaattaacttcacttcaagtcaaaaacctaaaatctcgccgggcgcggtggctcatgcctgtaatcccagcactttgggaggccaaggcgggtggatcatttgaggtcaggagttcaagaccagcctgactgacatggtgaaatcccgtctccattaaaaatacaaaaattagccaggcatggggcatgagaacctggaatgccaggtactcaggaggcactagaaccctggagggagaggttacagtgagccgagatcatgccactgcactccagcctgccagcctgggcaacacagcaagacggtatctcaaaaaaaaaaaaaaatctaaaatcctatttttcctttttaaaaaaacaccccttccccaagtaaaagtcaactctgataatggggagatctacataatgtttaccttaattacttcttccccaaattgaagtattcctccctattgtgctagaaaccaaaattaaacagcaccaactttccacagaaaccctcaggaatgacagccactaaggaaaaaaggatgtaaaagaaaggatggagcaagaggaggagggggagaaggctggaattcaggctttcctgtgaattcgctttgaaatgcctagaggccactggatctgagtccccaagaaaatctggtagagaggccagtgaaccagcataaagaatagaaaataaaggagatgtgttaaataattttgattttggccacgtgaagaagtattagtcatacaggtaacaagatcttacagggagatgattccaaggctcggcttgacaacgttaagtgtatatccattctgggcctggagtgccaattacatttccaaattggcaattagacacaatgtcccaagacaatcaccaaataatgccaaaaacaaagcaagttccatcttaaagcagccattcttttgaaactgcccttccctcccgtgcctgactcatccacctcacaaacaactgcccattatgaactaaatccttgttagctactgatcaagagaaaccaggtggcatgaataattaaaatccacgaatgattcaagcaccatgttgtcaacaaaccaagcccatctctttcaccaggagtttctccatagcatctaacaaattacccaaaaaagcaggaaaatatatttgccacccccaaccaatgcattctcgttcagcccccagctaactactggaaagagccttccaacatctacgtgtgtttacatttgcatgactcagttcctgccctcaaggagtttgcaggcaattcagagatcagatgttcatattccatgagaagataactgttttttcctctgctcagcctgtcaagtactaataaaagccctaacaagcagggagtcagaactgggtcttaattatttttcccccagcacctagcttggtttctggcacatcgtatacacttaatatgcaacaaaagcaaaaacaacaacaataattataaccagaagacttctttgagggcctactgtgtgcaggccgccacgatgctaggtccttcttcattctgcctgctgcagacactcatggtgctcccctctgatgatgaaacaacataaaaagcacatctcatggaaaaagtccctgacagtgtgagctgtgaaaaaccctggtatggtgagaaaaggagctactttcactttcatcttctggaattcttaagaagtgcattggagggccacacagcacggtgccacgcgtgtcccccagtcactccacgggcagctcttcagccaattctttgaggttgaaccctccatttgggaaggcccacccaggcccctacagaaaatcaggctggcagtcttaatgcccactgacttcaaacactccagagggagtggtccccagccagcctggggcatcaccgcagtgcagccctggtgacaccaccagcctttaattttgcaaggaggtagtttggctgggttgccctcctggacttcgggaagtcacaccctttgcagaatgaccaactggcacgaggaagagcccacacattggtgggtaacacacagaccacaccctgtaaacactgctctggccaccacaacccaaccctaaatccacaacgctgatgggttccttaggagcaggcacctggaccatcagttttcgcaaataagagcccagcccgaaccacagctaccctggtctgaaaggagttttctccacccaacgatctggcagagcaaaccttctgcttctcatcccttcccccttcaagagctgggaatttccacatttaaaaataagcctgtcttcagggatggactgcacggaggctgagggatggaccagatccttgatactcaaagtgtggtctgcacagcatcagtatagcctgtgtctcgccagaccagcataatctcaggtcccacactggatcttctgaatcacagcctgcattttaacagctctcggtgattcctgagcatattaaagtttgactaagccaggcacagtggctcacaccactgtgggagcactttgggagaccaagatgggaagatcacttgaacccaggagttcaagacaagcctgggcaacatagggagaccccatctctgtaaaaaatttaaaacctagccaggtgtggtggcacacacccataagtcttggctacttggggagctgaggcaagaggatcacttgagcctgggaggttgaagctgcagtgagcagtgatcatgccactgtactccagcctgggcaacagagtgagaccctgtcccaaaaaaaaaaaaaaaaaaaaaaagtttgagaagcccaggcctagagacactctccagtccttggagataaagatgtgatattcccactgaacattccccaggttttctgtccaaagtgctaggacacccttgcctccgagggtccctgggtttccttttctaggtgcctaatgcgtggggttccacccacccaagaagcagttctaaaagagacatccttggtctgctccctgactgtgcacagaaaggcatggccctgtctgatccccagggatgtctccaagggacccagtgttccccacacggcccagggcctggcatcacagcacaaacagccctttcactggaaccacaaaggcgaccttccaggggatctgcagcttggcaaggtggtattggctgctgtgattcacagattagcatggtcactgccagtgtgagccgggacgcccactttgggaaggaggtcctggcattgcaatcgaatgccaatgtaactgtttctgcaccaggcctctcatgccctgatgagagagagagaaagagagagacagccccaaagcaagcacttactcctggctatcagccaccaatgaatgtccccatccagggaacaaaatagctgtgaggcaaagagaaggtccatttggacttaccattggaatgctttatcccccaggccaaacagcagggggcaggcagctcttcttttcctcctgttgtatgtttggtcaagtttcctgggcacctagaagcagggctagcccaaggctcccaaagggaggccataggttctcagtgtcctcctaggaaatgctataaaatggggttggtgaaaaaaaccaccccatgaggctgtgctctatcacagacctcaatttgcaggtgaggaaactgaggcacaaaggcatgacgtctttgcccaggatcacaggctgaaccttgggcactgcacagcacccctgacactgaagcaagactgctcacaggtagcacatttgagggcattttaaccactttctctaccagcaggatgccgccaagcctgtgatgtggccctccaaaggggaagctcagccacgccatgcctgctgattttttttcacaaggtaatttaaaaggcaggtgtgccacagaacacacttggggaaacctggcctagggggtgtcttggaaaagctggtctgggtagacagtgagtgtcctggccaagagaccgtgacatcacttgggagacaggtctatgagttctggacttgggataacagggatggaatttgtccctcctcaagggtacaatgctggacaaccatacctgcccaccaaatgccacagtgtttcccttctgccagcccagcagctcctggtcccccatactgtcgatgttcgtccactgataccccaccatcaaaactgtaaccatcctgccaggaccccatccgtgaagcctacctctgctgccctgccctaactttccagccttgcaacagccaagagccataagcccatgtctcagtctgactctaaatggttttttgatctatgacagtatacttcaggatctaaagcctccttttggctcaaaaactttatttgttatagtctgcgcccttcaggggctataagttcaatgaatcaaagggaaaataaactcagcacttcatgaagctatgatagttaccacttacaagaggcctgctaagtgtctggcatttgcagggtgctatgtgcccattattcctgctccctataagaaccctacaaagtaagcatcagtatgctcttggtataggtgatgtaaccaaagctcaacatggttggcagtcaaagatgccctgctaataaatgtgagatccatgatttgaacttgggtttgcctgattgcagagtcttgtactaaagtgtgcatttccataaagagggccaggggctggacgccgtgcctcacgcctgtaatcccagcactttgggaggccaaggtgggcgaatcacaaggtcaggagatcaagacaatcctggccaatgtggtgaaaccccgtctctacttaaaatacaaaaattagccaggtgtggcagcgtgcgcctgtagtcccagctacttgggaggctgaggcaggagaattgcttgaacccaggaggcgcaggctgcagtgagccaagatcgtgccgctgcactccagcctgggtgacagagcgagactccatctcaaaaaaaaaaattaataaaaggagagagagagagagcaaggaatgaggagcacgagctctctggacaagggcaggtcagctggagctcccccgtgactaggacccaagaactcctccaaggccaccccaagtgatctgctcaaaaaggagtatctcaaggtcatctggtgcagccaatccccaggacaggatgagatgaggcacaagggccaatctggaatcaagagctccacggcactgaagctccagccctgattgactgcgtcaggccagaccctgggtaattaccaagctgtaatgggatctgatatttatattagtcacgagcctgacagagaaaacgtgttgttttctcaggcacagccatggagacaacatctcgataattcattacacgcagaccatccttgatcaagcccaagcttctacaaggccaacagctcaaactgagaatggaaataactctatgcccagccacactcaggcccctcaacaaaccacagctccaacaggaagttggcctcagtttccccagttatttaaagagaagtagaccacatgctggaagacgagcagaagatggaaataaagatatgtaactgtcccaaggctgaattcctaaaggaattgctagggaactgcaaaacacattctgagctagaaactttaaccctcattcctcaactcctccctctctcctatatcgaatcacagagcaggaagggacattagaactcacagaattcaatccccacattttatacacaaggaaagatagacaccagagaggttaaataacttcttcaaagtcatggctttattcaggctaccagagcagctccctattcaatatagtctatgacaggattgaacttcacaacgtcacacccaagtgaatagagagctctgatgaaatcccacaaggaaaaaaacaataatgtgaaaaagtacagcaaagaacacagtactggaatgactgtgaccaagttcccaacaggaggaaattgtaatgttttcttcttcactttctgaaaaagtccacatgccactcttttcaaaagactaaagtcattcactgtttgagattcagaggccaaaggtactaatgaagagatgtcccacgatgcatgtccacagtcttgggttcctttgatcaaaaaggtttggtgcgatcccagagaccaaacgctcatgaaattggagctccttgctgaattttatctcccacagaatttcagacctgctttcctctggactccagctcttgatcaaaccatcttggggctgaaggagggtgagggtgaacccatctgagggctggtagaattttctggaaaggcagcctatgttttcttgggaaatctagcacaaaaattattattctaagcttaagccaaatacatgcctgtgtatcgagtcttgacaaaactaccaaatacttggaaagaaaaaagaaaaaaagacaaacacacacacacacacacacacacacacacacacaattgcaataaaaatacagacctcaagcatagaaagaaaagcttttaaaaggcctaacttaccgttactgcatataatgagctggctacctatggcttaagtgagcaaatctaggggcaggtatcaagagattctaggtgtgctttaaaatggacttacggtatcaaaaggaacctgcactcattctatactggcctcacatcttccaaacaaaccaccatcacctctcatccctggcagatttcttacagcaactcacttccagttatgtccactcagcaggtcttggggctacaaaacatagccaaatatttacgaattgttttttctaatcgttgccaaaaacctattttcttgagtaaactgacagaagttatgcttgctcatcatttaggagatcctttgtgtgtgcgatgggattagcatttcattacagacactgcaattgcatttatgtaccccctaacataaaaagactttggaagctgtgtttaggaccccaggttcacaaaaacaccacaacttattttcaatcatggaaaaagttttcattatgataaaaattgccccctgcctgaaagaaagcaagctgttaaaaagttcacccagatcactctatctagggaacatttcagaggcacacaactatgagctatctttcccctaaagacagtcgctgaatctcagtaaaccggggaacaaaattcccgagactgttgggggaggtggaggagaaggatggagagagggaatgtgggaatttgaaggctccaggaataagctgttctcagcaggaaggctagtcagggatctggtgtatagggctttgcttaacctgagggcttctctggaaggtgggaggtttgcctccttaacaaataagaagaaacctctacggctgagaaggtaattccaaagaaaactctccgaccagcacctgcaggcctccggagaagccagagaatgacgaagagaatgatggttttcatatttctccctttgttccaatacaccagtattttccaaaacacaaatgtgctgccacaaaacacagctgagctccagcacccaacaggatgtataattaatgatcaggagagacaggctccttcccccctggtgttttcatagccagccttcacccatagccccaggcttccctacttctctcagccgccaaggaggctgctacaagttgctgtgccctgtagaagtttgaggggtcctcggtttaactttactagaaaagatgtgaacatgtggaggctgcaatgtgtatctaccctgcactattcccctggatttcccttccctccaaaacggttcgcgcgtgaagtcccctaggatgggaattactcagaaagaaggcagctggctcactctcttttttccagttctttcttttttattctgcagttttctatcagtgtcgggtcccccactccagccagtggctgtggggaagggaagacatctctagggacacgactacagaccaggcagtgagcctagcaaccatacatcgaaggtgtcgccagcctcagtgccggtgggcgtctgcaccaggaatagctaaagccgacgacatctagccacctcgagcgccagggaagacgctccgcgtaaaaccgcggcctcaggcggactcccgctccagctccgcgctgctggtggcatttccggggacccaaagtgggtggcctgggggcaaaggaacagaggccgaagaacttggggtatgttccactagagcacctaagggacggagtgggaggttacatcagatatgcgacctcgacacattccaaaagtggcagccccgtgggctacccccaatagtgggatggatctccccaacttctctcgcccctcgaagtccccctgttatctcgggccatgctcctcccccgggattcccttgtgcaaaattattctctcccttgcccaaaggatttttcccttctttctgaccccacgaactcatctccccaacaggttcctaaagtatgggcggatgtgctccctctcgcccaccgccaggagccgagccccggcaggtgagcggtgcaaaacacgcacccagctgcccccagcttcctccgtccccgctgagttggctgtccccaccccgcaccacggcacccgagcctgtgagtccccgaccccggccccagccgcagccgccaacaaccctacaataaacaagaggacaggattgagcgtccgcgtcccggagcgcactggctgggggcaactcctcacccccggcgcgccgcccgctgccccgatccgagagcaccgggagagccgagggaagggaaggcggcgaggggaaggcaggcggggatggagggaggcacggcgcggcgcggagcgaggaggtgggctgcaggggacgccgagaagcggtggggctggcgcagagggcgggcgcccggggcgcgcgttaccttcgtcttgcccccgcagtggcagcacacggtccacaggtacttgagcgtccgccagagcaagatgatgaagaggcccccgaagaaagtcaccatggaggaggccaggaaagcccaccacatgcgttggccccggctgtcgcacggcacctccatggtcaccgggatgatgagcgcatccatcttgggctcgtggaccgaggacgaggaggaagaggaggaggaagaagaagaagaggaagaggaggaggaggaggaggaggacgcgtctaggctgagatggttcgcgtggatattgctactcattctaagactgctgcctccgccgccgccgccgccgccgctgctgccgccgccgccgccgccaccatttgccatagctagcaacgggcagccggcgcaggggctcgggggagctcctcccgccgccagcgccaccccaaacacccatcaacagccatattgctgctactgctgccgccgccgccgccgccgcggagcgcgggaggggggcggggaggcgcctgggctcggggcgctgtgcgcgacctggcggggtgcgccgagatatatacagcgagccgccgccgcccgcccgggggggagggggatggagtgcgcgggcagctccccctccccggcccgcgccccgctcgccccgggctgcgctggccccgagcgccgagagccagggggcgccgcgggccgcccgcgcccggggtctgcgccgcccccgggcccgccccggctccgcgcgcggtcccgggtgtcctcggcgccgcgccgcccgccgtgcgccacgggtgtgcgctgcgctcggccggtgacccccttccccgagcgcctcccgcgcggctaacgagccgctctccgcttattaggtggtaactcgttaataatggataatcggccccctccgcccgggcgcccctgcgccagccctcctcccccggctgcgctcggctccggctcgccgcgccagtgcgcgcccggccgcggcaggttcaccgcgtccggccgccggcccgtggccgcctgctagcccatgttctcgggaccccctagtcctgtcgccacgccgctgagcccctcggcctccgctcgctcttcctccttgccgcctccgactcctcctcgtccccgtcctcgccgcccaagcctcttcggcgcgcgccccgcgctccccgcagccgccagcagcagcagctgcagcaactggagcgggcgcggactcaggacgacccaggcgggaggggaggaggctcgccgcgctggctcgcctgggctccgggctgggcaggggtgggcagggcccctcggcagcggcccggcaagcgcccctgacccccagggcgcaaggtagagcgcccccagcccaggcgcggggccaggcgcctctctccaaggtgctgcgcccccagccgagagcggtggggtacactgggaggacggcggggcgccccggtcaggccgtttttttccccaaagagcccccagtggggaggggaggagtggccagctgtcaactggattccacaggctgagctccccaggaccctcgggcttcgggagtgaggaggaccccacgccaggatacacacagctacccacccctacttcgctcttcctgctacctatgtgcccagggtcccgcgtgtggctggagggtagagtcaggaaggccagcgggtggtctgtggcctctgacagcagcaggtggtttctctcctttttccttattagcaacagaggctgcccaacaaagagtaggcagaaatgatcaaggacgacctggcctggggatagtgcaggccccgatagacaatagagttccctgaagggttgctttcctctcatatagtctcagactccatccatcccgtgaggagggcagatgggggaagagggactccagacttcattctggctcaccgttccccatttagggtcttcccttctccccacttaagatgaagaaggagtccgtgtttgttccgtagcgtgtctccgtacaccaccaggggaatcccccttctgacactttcagaaactttg

SEQ ID NO: 299 - DNA, 407119 bp, Homo sapiens
  source 1..407119: mol_type = genomic DNA
tcacagcgcccagcacaagctgggacccactccatccactcttgctgcaaatacagactgtgcactcctgtgtggcacctcactagggtggggagtcaggcgtcaagggcctgggctggactccgtccacgataaaagagcagacttttggcagggggtggtagatacatcaaattgacccagggtgctcagggacgacctggaagtgtcacatgagttatgggtctcctggcggggcggagagtcaccgctgagctccacctttagtccctgcctcagggctgtgtgcagtatcctgaaaaaagccggtctcttctgttggctgccccccaccccccccccaagcctgagacgtgctgagacccaaatgccagtagcgggcgggaggcagtgcagagacctgtgaaaatcttccgatgtgaccaacccacccccacccaggggaatccacggggcgcagcggcagcgcggtctcgacggtggggaggacaaggcgcccattctccaagttactagggtggcgcaagcgcctctccctttaactgcccaggcagccccgcctgctatgcccggcagtcaaaccaggtccagaccccggctgtgccgcccccaccccccagcagccctgccggctccccacccacacagctcccactgggaggtacctgacagtggtggtcccatctcaccctcccggtccaagggccctggtgggaagcgacccgagcgtattcgccgcccgcagctcgcgcgcctgggcacccgggggcgctcacagtgatcgcggggccagcacaccctcacccaggacatccctttcctccccccaaccccaactccggagtggctcagagggagggaaagtagatgccggcaccctaccccgcccctcctgcccccgctgtgccgttctcggtcgtggtatcggccaggccttaccccttcctccctggcgcagctggggtcctcctccgggccaggcagagcaggcgggcatcagaagtgggggccaagcaggtgggtgagggcagggcaggagcaagcaggggagatgcagacggggcggggccaagcaggtgggtgagggcggggccaagcaggtgggcggggagggggcggggccaggcggggtaaatgcacactggaacggggccaaacaggtgggcgaggagggggcggggccaagcgggatagatgacacgagcggggctaagcaggtgggctcgggcgggggtgggggtgggggcgggggcgcaggcgggggcgggggcgcggacaggccaagccagggggtgaggcggaggcagggccaggccggtccgtggggagagggcgggccaagccggtgggcgcgggcagggacgccctgtgcgcgccggaccggcgggggcggggcgtgcaggcgggggcggggcacgccgtcccatgggaccggccctcggccactgccccctccggccccgccccgagcgcccgggctgggccggcagcggccccccgcggcggggctggcagcagtggctgcccgcactgcgcccgggcgctcgccttcgctgcagctcccggtgccgccgctcgggccggccccccggcaggccctcctcgttatggccgcggcctcctccccgcccagggccgagaggaagcgctggggttggggccgcctgccaggcgcccggcggggcagcgcgggcctggccaagaagtgccccttctcgctggagctggcggagggcggcccggcgggcggcgcgctctacgcgcccatcgcgcccggcgccccaggtcccgcgccccctgcgtccccggccgcgcccgccgcgcccccagttgcctccgaccttggcccgcggccgccggtgagcctagacccgcgcgtctccatctacagcacgcgccgcccggtgttggcgcgcacccacgtccagggccgcgtctacaacttcctcgagcgtcccaccggctggaaatgcttcgtttaccacttcgccgtgtgagtatcgccaccggcgacggccggcacgaaggtgcttcctgagagctggtgtgggggagctctgtcccagcgccacctgccccgtcggagctgcgaccccggagcagaggagggaaggaagtggggaaacgcagaaacacaaactctgcactctcccttgaagttcagaggcgctgctgtgtctgggggtgcgcatcttctcgcaggcccggcgtggggagggagccggctggggaggggaccacctggagcccagaatttggctccacacctccgggagggtagtccaggtgtgaatccttctgggaagagaagcgtgctggggagcgcacccttgggtgcagtaagataactcctcaaggtcggctgagactcgaggctcaggagcccccaagagagaaggcccctgatgtccggtgccgcatctcagaccccctgaggcccaggtggactctggggcagggggctgtccaggataggaaggtgacggtggcggtgctccctgagggctcagcatgccacgggccgtccccacgggccccacattaactaattgaaccaagctcatgaaaacctggcttgatgcagagagcggagaggcacgtttgcagctctcactaagaggcagctgtgctcccggagaaagcagcgctggtagcagaggcacctggcccccctgttaccaggtggttccaattcccggtacagcgtgcctgagcagggctgggcactggatttctcagggacaggcctgggaagtcacctccgggaaggtccaggctgctctcctccatgcctgcctggggccttcccccgctgccccagtggccctacttcctggctgcccagccagcggccttttggtgtggtgccagcctctggcctgggagcctctacccagacatcccatggctgatggctgtggggctcacctgagggctgaagggtggtctccctgagcgtcctcaggtggaagcatctcctctgcctcgggcaggctcagtagagaactggctggagggcatccagaggcctgtccatgcctgctggcagctgccaccagggcctcagggcgggtgacagcaggagccaggccccaaatggcttcaagcatcgtctcaggtgagggggtggggtaggggtcgcagggctactgccttccttgctaagaggtggccttccacatcaggaaggggaagtcttacccacctccctcctcaaagatgtggttggggggtgatcttggagacttttccccaccccagctcccaagcccctgtctcctgacatgtcagtgggtgcctgagccacagccgctgctggtctgtgagaggagctggctctgctcgtggctgcaacagcgggggctcggcttggggtttgggagatatttgtgtgcagtgaccccaggggaacccagtccgatgccactgtgcaaatgtctagcagatgccaggttcacaggtgctgtgtgctggtggccacctgcctcccggaccccagactctctgagatgtccaagggtgggaagacctcctcagccagaggccaaggcaaagtgcccgcagaccccctcaattctcacttgtattcaggtttgtggacacatgcctccgggctcactgcagccacccgtgtggaggaagaggaggaagagggctcgccacgccccagaggaagtctctgcttgcacttgtgttttcttcctcatttggattgtttaggtctcggaagtttgctcagcaagagtctaccttcgcccagcctccgcagagctggcaaggcaggggtggcttctggggacaggggcaggatggcttctgtgaaggggtggccaggaaagggatgcttctgtgaagtggccagatctggggctggtcctttccagttctgggtcctgtccttgtaagacgtgtgcctggccctgggaagttgtcatgaacagcctccaacccaggtacctccatgtggggtgggactggaggtggaccctgactgggcaggacatgtggcttggtgggggcctgggagatgcgctcccaccctcagtgccctaggaggttggcaggaccagtctcttgaggggagacctggtcatagaaccaggatggcagagtagctggaggccacctgcagcctcacgaaatcaggtccagccttgcgccagtccagccttgtgttgctgtaagaagtcttggcaatggtggcggagacagggccctgtccttaggtggattgtgaaatgagaaatattgtggtttctggcctgaagacgacaagcctggccttgaagagccagggcccaggcatgtgtgcaggggggttgaggcaggagccggtgttccgctgaccctacagggctagggcgaactctcctgtgtgcgcctggggaagccagccaggatatcctgtcccctcctcggggaaccccccctccccaggagagcagctcttcctgtgttccttctggcctccctgggctggccggggtggacacggcacctgggccacaactcttgcccgcttaggcttcctgcccccaacacccccagttatctgtggttgcttgcgcccccactgggggcagctcccatcttagctgaggggatgggggtccatacagccctgctgcacccagcggtcctagctcccttgctgtgagccttagccaggggtgtggacatccaggtggcatctactctggttgctgagatgcttggagatcctggttgtggccaaggagagggatttgaggggggacctgcagtgcatggagactgcccctgtaggctctcaaacctaagtctggctcagcagcccctgttccccgctcctacagccttggctttccctgtttcccaagaactttccaggggtgttggcagaaccctcgcgggtgcgtgttaatcaacaatggagccagaagcaggtcccagaggtggatggggctgatctggctgcctccccaaaagacaaggccatgcagagccagctctcagggtgcagcacccaactttgtggactccagtgccctcctatctccaggctctggcattggagtctgaagcagctgctgggcagttgttctgcagctgggcagggaggccagaggccaaggcaggtggtggggctgggcacagaggaggacggggctctctgagccatcaggtctctttctctccatcttctttaagatctgtccacccactcctcagccctagattcccaggaaaactgggaattccttttggggcttttcccagtgctaccttctgtggggcatgagcccttggtctcatcccctggctgtctggggtcccctcacctacatcgcagacccggcccagtgtttctagatccgctcttgccaacatgtcgagtgcctaactgtggcttcgtactagttggggggaacacaggcatcccttacccctggccgtcagctggggagggggtagtccaggtggcaagagcctagagcctgggagaaagggcctccccagcctgtgtggggacaggggatcaggagggtggtagggacttgggtccttgcaggtggcctgggcagtgcctggtgggcatggatcaggtggcagggctttgtgtctgggcatggccctgtggctgggctgccttggccagggtcctgggccttctgagtctgcgtctcattctctgtggcaggctcctggtgctggcaccttcagtgcagggtgcctcggttggagggaacattcacccgtgcctggcactgaagccacagctccctgtgggcatggtgcccgcagcttgagcctacaaccctggggtactgggggcaggagggtccctttttgcttggcagttgcgaggtactggaacctttgcatataacgtgcgggctgcgttgtgtcacagggccgggtctgagggaggggctttgcggggacactcctgggtaccgatgggatgaacttccgctgggcctgaaggcctgggatgcttttgggccggccagtgcggggtcaggtggttggagccagggagctggcacgtcagctgctgctatgagttctgccacgtgccatcctggcatgtggcacgtcttgcagaggacaggaagggtgaacagctccaaacccaccctatgtgtgctccagagctggaaacaggctgtgcggagctgagtgcctttgggggcagctgagatgggcaggagcaccgtgcccaccgagggtgtcagagtgacaggggttgccaggcaactccacccgggtggctgatgcccccgtttttaaaggcgttgggtgccgagaattcccctcctgctgctaggctggtttcaagtctgctccttctgcacttgacgtccttgccagtgtgatccagagctgctcacacgagcaagcgtcctcgagtcctagggatgctgttaacagggcagcgggtccagggagctggtcctgacgcaggggtcctgatgcagcgggtccagggagctcatgccttccagcgatgggaatgccaccggtccctgtagccaaggtgcagatgcacacgtcctggtcctgagcccctgctcggccctaggcagggcccccagttccctgcattccacccgccttgtctgggaggtggacgagccctccgtagccctgacattccaaactggcttttggcccctgcgatatcttgctgtgattcaagactctgtccacgggcaagaacaacaaggctgggacaatctcatctcaggcatctgtgggaggagacagctcccaagggcggtgatgccaggagaacattccaggcccaggaagagctgagagacagcagatgcccaagacgagttgctggtgtgtggccagtgctgggagagcatggtgtcggcccggggagatgccgcagagaagcttccagaagcccaacatctgctgctggaggggagaatgaggcaatgaatatcaccatcctgggccactttgacccagaccccaaggatttggttacagaggggagggcggcagcgtctggcttcactctcgggaggtgccttggggctggccagtatgggattgctgtcactgtgggtcactccagccccggatgctcctacaccatgctctgcttgcatctggggtccctgcgggcacgtcggtgagaccgtcctggcctccacaccccttcctggtgggtagctgtctctctccagcagctcctccaaccaccatgagaaaccccagacctcacagatgcaaaattatcgtggttgacaaagggaggcggctggtgtctctggtactggctgggtgaccacagggatgccgcgtgaccctagtccagggggccgcttttacacgaggcatctgaccatgtgatagggtgtggcttctgctgcctggcccagccctcttctgggagccccacgtgggtgggtgctggctggggaggggcttctctctggggagcaggccctggctggaggtggggaagatccatgatgggacccaggtgtcttcccacttctcgaccatctcctgggaagttctaatgtttggttcagggtgtggggtccatctgagcaggcatggtgcttccagaaggatccaggttaagggtggtgggtccaagggggtgcctgagcccttctgcagaaacaccgttccccgtagagcagcagtccccaacctttttagtaccagagacctgttttatggaagaaagatttttccacccgggcagtggtgatcttgggatgaaactgttccatctcagatcatcaggtattagattctcataagaagcgtgcaacctagatcccttgtgtgcgcagttcacaataggatttgtgctcctgtgagaatctaatgccaccgctgatccaacaggaggtagagctcaggtggccgtgcacattcacctgacgctcactcactgctgtgcggcctgctccctaacaggccacggacccggggttggagaaccctgtcttagaggattgaggctcggggccatgggatcggcactgtcattgcccttggagggttctgagcactggaaggacctggctgtggtcccaggcactgggtggatggaccagcagaaaggctcccaggagggtcgtggctccctcatcggcaccggactctcaggatgagccgcctggagtctgttggcatctgcctggccgcctctggcaggaacttctcctgatggaagagccgggctggggagctgactccaggacaggcccctgcccgctctgggacctggggcctgggctctgctccccatttcgctcctccactcacagatgaggacatttgggtcgccttacagatgagacaactaggcctggccactttgctcatgccacacccagaaagccctcaggacacccagaagcccttaggatgcccagaagcccttaggatgctgtggtctcaagtgaggtggtgcactattcctggcctcaggcccagtttgtatccatgggcacccccactcccacctagcacttgccaccaggaagcaccctgaggactgtcccctttgagagttggctctcaaagccttggtctgtgcctgcgtcctggcagcgggtgagctacggctgccctcacccagagagtgcaggttccctgggggcgggggctcttagctttccctccatatctgctaaggtgcacacctttctctgctgccttccaaaatcatactctggggcgcactgaaagggtgctctgagtagctctccccggctcctggctgaacttgctccaggcagagatttgaagagattcagaaagcaggaaccacaggcagagcagctggacagggacccccacccctgtactcccttcggccctggaatgctcctctgcatggagacagcccagctgcactgggacccctcaccccaccctggggccaggggctgtgtcctcgacttccacgcagagcagcccgggcagcttagaggagggagcagaaggagctctgactgagaggggtagacccctcccagaggcatccccaccctgccccaaagaggggagcagctggagacggggcgggaacctcctctggctatatctaagcagccccgggaaccatgcgcttcaagcgtttgatcttgacgggccctgggcttggcattctattccgtgacgtctccagctgttctcttgtgaagagtcacgtctgtgctcttggctaggatggctcaaatattataaaacatacagctttgctaattaaaacagcatgacattgccttataggcaggcagatcaccaatggaacagctttttaaaaaccgcatgtaactccattgtatatgaagtttcgtaaaagaggcagcatctccaaccagtggggaacagatgggcggcttcatgcgtgctgcggggtgggtgggtggccatgtggaaagtgaccagactgcacccacttgtcacatcacacaccaggatagactcccagtgggtcagaaaaccacttgggtacctaaagaaagcgcctggaattctttaccctgagagcgaagaaacttttctatgacttgaatgctagatgcgtggaggagatttatgtgtttgaccacataagaaagaagcaaccttggctgggtgcggtggctcacgcctgtaatcccagcactttgggaggccaaggcgggcggatcaccttaggtcgggagttcgagaccagcctgaccaacgtggtgaaaccctgtctctactaaaaatacagaattagccgggcgtggtggtgcatgcctgtaatcccagctacttgggaggctgaggcaggagaatcacttgaacccgggaggtggaggttgcagtgagccgagatcacgccgttgcactccagcctgggcaataagagtgaaattccatctcagggaaaaaaaaaaatcttaatgggaaacagccaattgccaggctgggggaagatgtgatgtttcacgaagggttaatctgtttactacagaaagagtttctgaaaacagaagaaaacccacagccagcaggagatgtgaataccactcacaggacagtgacccacagggggaccttgaacatgtgagaaggtgccgccttcactcctggcgagaggggtgtcgaggaaaatgtcactgaggtcccttctggctggcagaaatcctttggcatttgctggtaggcatgcaagagggtagactctgtgaggaagggatttggcaacatctagcaaaactgtcttcactgacctgtgacccagcaaccccctccccagaacctacctgaaggcactggcaaaggcaggagaagctgcgtgtgcagggctgcttgtgaaagtactgtttggaaaactgcaaatgcccattgtaggagactggttgaatcagagatttgtggaatattatgcagctgtaaaaaaggaatgcatagatctctcttattatgaagtgattatcaggatttatttaattatttttttcaggcagggtcttgctgtgttggcaagggtggtcttgaaatcttggcctcaagcagtcctcccacctcagcctcccaaagtgcttagattacaggtatgagccaccacacctggcgtatcaggatgctttttaagtgaaaaagcacagtgaataaaaatatagcagctattcttcatctgataaaggggaggatgcaagtctggatgtatattaaaaacgaaagcaatggaagcctccaaatcttaaaagtttacctcaaaagggtggcggggggggaggtggcatatggaatcaagatgcctctgaatgtacctggttttatagatttcactttgaagccatgtaaatcaatagcttgcgtaatttttaaaaagctgttcgtaatcgcttggtgaaaaatccctaaataaatcttaaccagaaaaagtagtccctcaaaattgaaatgaaacaaatgagcctaaaaatgtgtgctgaattagtggcttaaccacccagaaggactgatttcaggtgacatatttctagcgggttactgctgaagacaaatagagctgcatgcagtggccacataattgttgtgatactatttgttatattattctaagagtgctgcatgggaattgcaggttaaggtaagtaattgtgttggtatcaccaagaatggaggttttacaaaatatgattcacatgtaaacagaattaaaaacaaaaaccgtatgatcatctcaatagatgtagaaaaaaacttttgataaaattcatcatcccttcattaaaaaaccctcaacaaaaataggcatcaaaggaacatatctcaataagagccatctatgacaaacccatggtaaatgtggtactgaatgggtaaaagcgagacacattccccttaagaataggaacaagacaaggatgcccactttcaccactcctattcaaaataatactggaggtcctagtcagaaaaatcaggcaagagaaagaaataaaaggggatccaaataggaaaagaggaactcaaatcatctcccttcaccgatgatgataagattctatacctagaaaaccctaaagagtctgccaaaagccttctggaactgtaagtgaagtctcaggatacaaaatccatgtacaaaaatcagcagctttttttttttttttgagatggagtctcactctgtcacccaggctggagtgcagtgatgagatcttggctcactgcaagctctgcctcccaggttcacaccattctcctgcctcagcctcccaagtagctgggacaacaggcgtctgccaccacgcccggctaattttttgtattttttagtagagacggggtttcaccgtgttagccaggatggtcttgatctcctgaccttgtgatccacccgccttggcctcccaaagtgctgggattcaggcttgagccaccgtgcctggccaatcagcagcattcttatacaccaatgatgttcaaactcagagccaaatcaagaatgcaattccatttataatagacacaaaaagaataaaatacccaggaatacatctaaccaaggaggtgaaagatctctacacaagagttacaaaacactgctgaaagaaatcatagatgacagaaatggaaaaacattccatgctgatgggttggaagaatcaatattgttaaaatggccatacggcccaaagcaatctacagattcaatgctattcctatcaaactaccaatgccacttttcatagaattagaaaaaactattctaacattcatgtagaaccaaaaaagagccgaaatagcaaaaaaggaactaagccagaggcatcacattacctgacttcaaactatacttcaaggctacagtagccaaaacagcatggtattggtacatagacatatagaccaatggaacagaatagagaactcagaaataaagccacacacctacagccatctgatcatcaataaaatcaacaaaaatatgccatggggaaaagacttcatattcaataatggcacagggataactggctccccatatgcagaggaatgaagtcagactcctatctatcaccatatacaaaaattaaagacagattagacgtggccaggcacagtggctcatgcctgtaatcctagcactttgggaggccaaggtgggtggatcatggggtcaggagtttgagaccagcttggccaaggtggtgaaaccccatctctactaaaaatacaaaaattagctgggtgtggtggtacgcacctgtggtcccagctacccgggaagctgaggcaggagattgcaccactgcgctccagcctgggtgacaagagcaaaactctatctcaaaacaaaaaaaaaaaaattaaaaaagattagatgtaaacattagattacaaactgaaaaaatcctggaagaaaatagtcttctcaatattggccttggcaaataatatatagctaataagtcctcaaaagcaattgcaacaaaactaaaaattcacaagtgggacctaattaaagagctgctgcacagcaagagagactgccaagggaataaacagataacctacagaatgggagaaaatattagcaaactttgaactgacaaaggcctaatattcaaagtctacaaagaattaacaaatcaacaagcaaaaaaacaaccccattaaaaagtgggcaaaagggccgggcgcggtggctcacgcctgtaatcccagcacgttgggaggccaaggtgggcagatcaccaggtcaggagatcgagaccatcctggctaacatggtgaaaccctgtctctactaaaaatccaaaaaaaaaaaaaaaaaaaaaaaattagccgggcgtgggggtgggcgcctgtagtcccagctactcgggaggctgaggcaggagaatggcgtgaacccaggagacggagcttgcagtaagccgagatcacgccactgcactccagcctgggtgacagagcaagactcggtctcaaaaaaaaaaaaaaaaaaaaaaaaaaacccaaaaaaacaaaaagtgggcaaaagatatggtagacagttcttaaaaagaagacatacaaacagtcaaacacatgaaaaaatgctcatcactgatcatcagagaaatgcaaatcaaagtcacaatgagataccatctcacgccagtcagaatggcctttgtttaaaaagtctcaaaacaacagatgctggagaggcagtagagaaaggggaacacttacaccctgttgacgggagtgtaaatgagtccagccaccatggaaggcagtttggagatttcccaaagaaccaagagttgaactaccattcgatccagcagtcccgtgtgctgagtttatacccaaagaaaaattagtcgttctaccaaaaagacatatgcacctaaacattcatggcagaaagacatgagtcaactcaggtgcctgtcaatggtagatcgaataaagcaaatgtgatatatatacaccatggaatactatgcagacgtgaaaatcatgtcctttgcagcaacatggatgcagctggaggtcgttatcctaagtgaattaatgcagaaactgaaaaccaaatactgcgtggtctcatggattataagtgagggctaaacatcaaatccatgtggacataatgatgagaacaagagacactggggaatacaagagtggggaggggggaaggggagcaaggtttgaaaagttacctgtgggtgctgtgcgcactacgtgggagaccggatcgtttgtactccaaacctcagcatcatgcaatatacctttgtgacaaacctgcacttgtacctcctgaacctattaaaaaagttgaataaaatggaaacttttggcatgggagaaaaaaaaaaaaaacagatgtaagttagaagaggttacgcaaaaatcctccatccctgcatttgaatgaggactatcagtatgcatccaggatgacgtttacttaaatatctctgtttcctggaaaggcccaggaccaaggaccactcagcagctaagagcatctctagaccccagactgtggcctctaggtaccatttccccctgaaagaaaccagggcccctggcggattccaggtctgtggcagaagatgtgcaagctaagcctggagtattcatcacagcagaaggcagggaagttatcagaggccccctagggccatgtcactggaacttgaaggggtccttgtcttcccccttctccccaagctgaagatgcagtgggtaagcctcactgaaaataacagaggaagtggatgagctgcattgatggggttcagatcccaagttcatcctgatactgaggggcaaaaccagtggactttgatttgcatttctctaaagatctgtggaggtcaatagggagaccgctcatgatgttgaatcctggcaagcaaacggagagaatctgacatgtgtcccagtcgtgattaacctgtgaactgtaactcggggaaacccagtagctgatggggttgcgtccttctttgggactcccgcagatgcctgaggcggcagtgctgctgaagtcctgccaggctccagctcctggtgaggtcagggattccgcatgcagcgtcacagctgccaacctctccaaagcagtaaaggccttcggacagtgcacagaaagtgctcccatccacaatgcttccttgcctggatggatggatggatggatggatggatggatggatggatggatggatggatcgatcgatctcaccaagcctcgtgctctaagtacaagtttactggaaatactcgggccagaggaacgcgctaaatgatactacaggaggccacttgcagaatcccagtggtgggggatggctctgtaggacacatgacctgatttcctcagtaagtcaatgaccaagaaataacggagagaaggaggaaagaatcacctatccaccaattgtgacatatggccttagttaggtcctcaataaatgatgacaaatattggattaaattacttctggtttgctgcatgttccatttttgcccatgccgcacctgccatggtgcatttctgattcccgtgcccagttgggaggctttggggttgttgggatgcttttgtgaatggcttccttccttcccaggcacaggggctttatggggctctggagcagacagaccagagtttgcacccagctcccagctggccatgttacctcaactgcaaaacgagagacggacttccttgggacgcggtggtggggacactgtggtctgtctcctctgggcgccccgtggcgcccggtggtgtgaggttaggatgtggggcgtggtgtccagggactgtgtggcctgcctggagctgggcagagacaaagcatgcatgtgacactccctgacttcaggccataacaggggcaggggtggggggcaatcagggttcctagaggacaaccccatgtagttcctcactgcagggcttggagggagcaggtgaaggcttacctgtcttaggtaatgaggagctgtgcgggtctgagacagctctggttcctttaagggtatgtaggggtcactgccagtctgtagctccctctgtgggggcaggctgtggcactgtggcgactggcagtactgacttcctctaagccaaccgggcagggacaagtcagcttgttgttccgtccacagtagagggcggccctgggggtgaacggctgaccgtgagggcgtggtccctccccccagaccaccccggaggccccctccgccctcctgcctacaaagagttccccctttgtgttgagaggcctgggtctcagaggtagatgaatggagtcgtgaaatcaggcagggattcccttctgcttaaaacccactctccttcccatgcagcacaggtggccaaaacctgcggctgggtcagaggactggtttagtaagaatttttttttttttaaatgtggttatctgctagccagaaaaggtgtgtggtttcgcagtctttcagacaaactgaatttaatagtagctgacgtgaacccctgtttctcctctaggctccagagccgcaccccagtgcaggtgtggaagctcagttcctccaaaacccagacaggccttggtgtcctgactgccacccccagggggcccctcactcgagtccttgcttgcagtgcccatgggcagcagaggtgtccggagatgcaacagggcccagacccctaccagcctgtggcccagctgggggcaggactccggggcagggtgagtccctgcgtgacctgattctctgtgggcaggccgggcagggtggctgcagggcggcggagcctgtgctgctggcctgcatttctctggctggacagatactgcgcccatatccctggtctttcaaagggctctgtggctggtggagggcagcaatgccccaagggaggagcaggtgcccaagcccccaggtggccctgcgggtacaggtacttgtttactctgtggcatcagtcctgcttcccagctcaaggccctggcctccacaggcctcctccctccctccctccctccctccttcccttttttcctgtggctccaaggcccacagtagaaaggctccagtctgtgtccatgtgttttggaggcctctcaggtacagggactgtcagcccagctgtaagtggaccttggaccgcaaatttgcatgggcccctttgccaaagccctgtgcccactgctggggaacgctggggactccgctcttgtggggcagtggggctgggtgggagcaaccccccatccgggtggctgtggccgaggcccttatgagagggtggtaggtgtgtctccacagtgggggaccagatctctctctggccccaaagactgcttcaagcctctggaggagcactttgccccaggctggggcgtgactgcttctggttgagggttgctgcctgtgcaggtggccctcttgtcggtcttgtctgctgcatgggggtgtggcctcctgtggatggcccctgtcctgggtggtactgctgcaggacctgggtttccgggggtgtccgggagtcggatgggcctcactctcctggcctccactgggtccaggagtggcgatctgtgagccaatggccgtggctgggggcagcctggggtgttgagaggccctgggcagccaccttgcctctctgagtttgtcctcatgtgtctctggggctggaactcggtgtccgacctggtgatgggtcaggtgtgatcaggtgtgtggggctcggtctgcatgtgcagggctgtttgaaggcctgtggggccatctgatgccccccttttcttcagccttggagaggatggcttctcaggccgcctcgcagcagatttgtagtctggttgctgtcgttcctgaaatagcctctgaagctctgtccgggaagggaaccttgagtgtggaggagataagcctgctgactgggtgagccggccggggcgggggtggcccctcttcccttcctcccctgcagcttccatggcctggggctgtgagaggcccgggaaggcactgtctttgcgcctgcacatgtgtgtgtctggagtgtaggatggcactggtgccgggcctggatttactcagcccagatcacggctgcttttgtttacgtggcccctgctctcacccacaactccaggtttctggctctcgggaatttgaggcctgtggctgctgtggaccctgggaaagagcctgtgcttcctgagccagtgcggggcctggcatggagtaggtaccccgggggtggacagataggcagaggaagggatgggcaggtggatggggggctgaattgtggtcagttatgggtggcgggtagatgggtggacagctggatagatgaagtactgggtgggtggagagagaaaggggtgggtggacggagggatgggcagggagagaaatggatggggcatgctgcttccagcacccactgggtgcagctgtctgctgtctgctgtcctgggggaaggtctggagagggcctctcggtgagtgtggactcagccagcctagtcccaatacagctgggatgcattgctgctccttccgccatcccagcagctgtccagagatgagacccagccccactgtgtctttctgggattcacaagaatccttccctgggctgagggggcgttgctgtgggtgtatctcatggagagccccaaggagccagggaggagccttctggtggtttgggttctggattggtgggtgctgggtgggtcttcatggctgttcttggggctgccaggcctgcaaggtagacaggcctctggacttgagtgtggctgtggacgagggcagcgtcgccatcagaggcgatgtctagggccaccccctctgacttgcctcctcctccttctgacttgcctcctctctctgacgggcctgctcctgagcttgacacctgcctgggggctcccggcgaaggccgctggtttctagaatgcaccatctcttcctggcatgacgggaaccacctgtgacattgccaccacctcgctgtaatctgggcagcagctgtcatgatcccaccatgtgccccccgtgaggcccccacctgttactgagtggcagggacgtgctcccacacccccatgcgccatcctgcaggtgctttctgctgacttctgtgtgccctggggcctgctctcttggtaggggttgaccctgcctgtgacttagacagcttggagggccaggactgaggggagggggcggtggagtgaaggggagggtgggcgctgctggcaagaaccacaggcaaagagggtgccgggggcagggaaggcctggaggtttgaggagcagaaagtagacccttgaccctccctgggctggtgagtcggggcccagcccagagtgacagggaccaaacctgggtccatgtgccgtgcccagcctggggttcaggtttcttccccgtgagctgagcagacagggagggtcttgggggaaggctgtgggcccttgggtggaagagtcttgggtgaggcccctgaactggtaagcggggcagcggcggcagggggcccagggaagtggggccagtcgggggtcctcaggggtccttcagggatatacctgctgtcagggtgtggggagtgggaagtgggggacggggtggattccaggattccgggttgtgcttggtcagagtggggaactggacgctccgtccctggctcagcctctcccggctgtgaccttgggggaccattgactttactgtgtgcctggagagcctaatccctacctgccagtgggtgacacagaaggcaggaatgcagaaggcctttcagaagttctcactggcctgcaaggtagaggctgttttctgctgaggatacatttgccccctctatcccccagatcggcggctgctcaaggagcctggtacagctgcacggaggcgcagcacccacaggacaagtggtggaatgttctggttgtccttggtgcaggtggcgggcggggctggggggctctgtagccttcctggcttcggtcccctggacaggctccacctccctcttatcgtggcccctttggcaggctgcctgccacctcaaagtcacgctgccctgggcaccctgcctcttccggggactggggctggggctggggcagctgtgtttatgggtgtactccctgtgctgggcactgcgctgagctcaacacacaggggctcggggaggtctgtgggtgcccaggccgagatgtgaaccctgagtttgtgcaactcgagtttcagagtggcggcctctgctcctcacaagacattgccctgcgagggggtcagccctgaagccggatggcccggcccccgctaccacgtggaggctccctgtaggtgcttgtgtagatgcccccgtgcggggacttgtttggctgatggatcagggggaaggttctccccacggtgtgaggcagcaccgagggctccgtgcccagcaggctcactgtcggcagttgggtctggtttgataaccgtggaccggggtgacaggccctgactctgcagagcaggactgtggaaaatggacactgatgctgcccggtggatccaggcagggccgggatgtttgcaggacccacgggacaattagaacgactgggcctgactggcacagggatgtggactacggtgcttgccatcagcagatacaagctgtacgcagtgggccgcaggcgctccctgggccggaacacatggacgtccaggtgtggaatggcccggacagcagataacaagccttcgtcgtggtcacccctgggtgtgggctgtgggttttaatcttttcatttttgctcatctgaattttctaattaaaaatatattgctttttaaaaataataaaagatcatttaaattaaaatatataagtgaggagaggctggtaagaggattctggagtccctggagtgtcttctggcatcgcatggatgagaactctgaatgaattgagtgtgatttgacctaggagagtgccggggtgggggcaggtgcactgtggtcctgggtccacatggtgctagggtcccatgggctcctggcccctggctgctgcccccacattgggccctgcaccaggcatgagtcccatgtcctgtccttggggaggcctgggggacaggagttgggggggtgggcagtgcctctgtgtggcagattccagcttctctcaggggccaggattacatggtccgtgttggactctgggatgctggtgggaagaacagtctgggcgaggaggaaagggtggctctgctgacccctcctaggtgggctggggctgaggcggatcccactgtggggagctgcccagagatggaaggagctggagtccacagggcgcttctcttctcttttcctgtgtgttaaggtagttcaaagtcctcctgcccgaggaagtaagacagcaatctctggggtcctgggcaccaactctgggcactgatgggctggtccagtgcagggagctgccccggccgcccccgtgggtgcaggccatgggctcttgtttcctttcccccatctgtaaaatgggtaacggccgctccttcaggggctgttagccacatgcttagaccgcaccgagaaaatgcagtccctccagagctcctaaccttccatgggccacaggccccttcccagaagtttttttattttttatttttttttgaagcagggtctcactctgtcgcctaggttagagtgcagtggcacagtcatcactcactgcagtgcgacctcctgggctcaagctggcaccgtgaccccttctccaaggcctgccaggctggcctccagtccaggtgtgaggccctgaggccctggctgcagctggaagctcttgggcagtgcactgtccccacagcggactgcctcctgcagccaggtggccttaggtgatcctccaaggtccagccagccaggatctgagtcaggaggaaccacggcccccaccagggctgagactcctctgagctcgtcacttgtcttggttgggtagaggcctgagagggtggacacttgcccagggtcacacagcttgtgcgtagcagagctccctgtccggcccctgccccgtgctggcccctctcacaccttgctcacgctaggtgccttgtaccagtgcctgcttgggggtggaattggagaggggaggggtgggcgccgagctctgcctcccaccagcatgcttcccagagcttcctgggagaaggtttacggaggagtggccttgtctggtgtccctctgggtagagcctgtgttccgggcaggctgggaacaatgaatggtacagatccacggctccccttgggccttggtgggctccagccatgcctcctggaaggccatttggagcctggctggcaggcaggagctgtgtgctgccaggcgggtctagatgtggttggttcctggctgcacctgccgggctcatgacctgccctgtcctttccttggggagcttggtgacggctcaggtcgactcccaggggcccgcccttcagggcctgcatgagtgttctcgggctggctatgggggcattgcttcttcctgtcctagccgggacctgcccatccacccagggggctcagggacgtttttgagttttcctgaggctttgcctagggagtgtcgctgaggaagctggaacagtgaccttcgttgttgggggaggagatgcaggcaggctgtggcccagctgccccattttgtagctggggaaactgaggcccagagtggagaagcgatctccaaaggggaggtgacacatggctgagccccgcctgatgggtgcttgctggggggagaagtcctggctgggacttcccctccccaggctggggtttgtcccctactttgcaggaggaggggggctcccagaagagagtgagttttgagggaacacagtgctgggggtcccctcctgggcctggggctgtggttcttagaggggcaaggggctggcccctgttgctggctgtggcagccacagccttctgacccttgctggcctgtcgtggagtggggttcaagatgctatcactgacatctgcccaggctcgggggcttctgtgtggtgccagccttgcccgggggcacagccatcagcaggccagaagtcctcaggagagcttgctgccaggctgctgcctggggccaggcttcagatatgctggccagccttgtccagggggcctcctgccaggtgggcagagggagagggccttcctgtcctcatgagaacagggctgagctccatgttccttagcctcccttggcctcagtcatcctatctggaaacagggatcataatagttttagtttatagagagcgagggcctggcccctgcgctcttcctctgtggtctcctctgcccgctcccagaacacctggcctcctgctctgagggccagccctgggttgcagcagtgagcatgacctggccacagtctaggggctttggggtgggtttgtgggcagctgggctgcagggggctgtgggagcctgagggagtgccttccaggggaagcccgacagatgggggcactccaggcaggggcaggaggtgacctggaggtcggaggagcaagctgtggctggagagccgggcagggttggtcagcaggtccgagggcctgggcctccctggggtgagggccagggtgcctctgcaggggtggaagtgggctgtgagggggtctgggtttatctccccattgcacagggctccatggggtgggctgagccatgagcgcccttcgtggcaccttggtgtccggcagggaggcaggggcccaggaggagggcaggactggcttcaacggtgtcggcctctacccttttggtcctcacggaggaggctgctccctcttccctggagcagccagggatggtgtggggccctggtcccctggcttgatataggcttctgcagaggatatggtgtggccgggggctcagctgagaagccaccaggagacagatacagcctcaggaagtggttttgtatctctgctgagaaccacaatccgagtcacatgggaccattgagatcacgtcagggtgcaggctggggaaggctgggagctggggtttggcaaaggcgttggggtgctcttgtgctggacaggctgctgcccaccgggcctggcccaggtgaggtgagagacacctgccccccacgtcaatgcctgggcacacgggcccagtgcacacagccagcaggcgtgcgtcttgcaatgggggctgtggggacccctttgctcccctgatcccttccctgcagacccaggccaggtggattcaaggtgtggggcagggtaggagctgggcactgctggatggcatgggccacccgcactggggctgctgtgacctccgagtccaggcactgccttccacctggttagggacagggcagggaggctgatgggctggcccagcgtggggacctgcccagtggccctgtgggtgcaggccatgtgcctctgcatttcctttaccccatctgtaaaatagggataacagcagcttcttaaagggctgttagccacgtgcttagactgtgcccggaaaatgcactgtctctcctgggctcccaacctttcacaggccacaggcccattcccagaagtttattttttatttttcgagacagggtctccctctgtcacttaggctaagagtgcagtggtgtgatcttggttcactgcagcctcgacctccctggctcaagagatcctcccgcctcagcctcctgagtagctgggactacagatgcacaccaccacgcctggctaatttttgtattttttgtagagatggggtcttgctatattgcccagtctagtctcaagctcctgagctcaagcgatctgcctgcctcagcctcccaaagtgctgggattacaggcatgcactttttttttctaagtagctttacggaggcgtgcttggcatacggtaaactgccccagtttaaagcagacagttccatgagtcctgacatttggaggccctgtgaagccagcatcagcagagtgggcacacccatcaccctcacagcgtccccctgtccccacgaccaggccactgctgccctaccatcaggcacgatggatgggcttgtgccttgtggaattttatttggatggactctggcagccaacgctggtttcgtctggcttcttttattcagcgtcatgattttgagctgtgtgtctgttgtgtgtgtcggcctgttgtttgggtagagcctactttgccgatccatgcacctgttgatggacatgtgggcggctgtatcccatttgggctctcacaaatgatactgctaggaatagctggagtctctgtgcgagcaaatgcttttgcttctcttgtgcaagcaagtggttgaactgctctgcagcccgctgggaagtggaacggctgtgtcatggggtgggtgagggcttcactttctaggacactgacaaaccgttttctaaagcagcaatccccttttgcagtccagcagctccgtgcgacagctctagttcctctgtctccttgtcaacacttggtgtggtcggtctttaattttagccaatctaacaggtgtgtcggggccctccctggcattcctggtgactcactgtgtggggtcatcttttcagctgcttagttgttgtccacatatcttctttggtaaagtgtctgtcaaattgtctgttaagaaaacgtgggtggtttttcattgaattcaagagtttttttttttttctttattttgagagagaatctcactctccgtctcccaggttgtagtgtggtggcgtgatcttgcttggctcactgcaacctctgcctcccgggttcaagtgattctcctgcctcagcctcccaagtagttgggactacagatgcccgccaccatgactggctaatatttgtattttagtagagacagggtttcaccacgttggccaggctggtctctaactcctgacctcgtgatccacctgcctcggcctcccaaagtgctgggattacaggcatgagctacggctcccggccgagatgttacatgtttctatattctggaccaagtcctctatcagatacctgctctgtgaagccttcccttatcccttgctagtccttcagttcttttaaacaattttttttttctttttttgagacggagtctcgctctgtcacccaggctggagtgcagtggcgcgatctcggctcactgcaagctccgccttccgggttcatgccattctcctgcctcagcctcccgagtagctgggactacaggcgcccgccactgtatccagctgattttttgtatttttatagagacagggtttcaccgtggtctccatctcctgacctcgtgatccgcccgcctcagcctcccaaagtgctgggattacaggcatgagccaccacgcccggcccttttaaacaacttgtttttagagctgcggtctcactctgtcgcccaggttgaagtgcttggtgctatgacggctcactgcagttccaactcctgggctcaagccatcctcccgtctcagcctcctaagtagctgggaccacaggcgcatgtcaccacgcccggctgattgttaaattttttgtagagctggggtctggctatgtcgctgacaatcaaaatgaggacttgaagcatactcctcaaatcatcgaggtttattgagccaacgtgagggcacgcccaggaaaaactccagtcacagaagcatctgtggctgctttttccaaagaggtgcgtaggaggtttcattcatatttatatgttttcttgaaaaggggaggggcatcaagtgagacaaatgattatatacttgcgagactttagttagagcccagtaaatctacattttacagaagacgtatattggaggaaagagggagcatggaagcgtatatcccagggaggcggaagaacatctcgttatctcgtctcgcctttgttctgtgcctgggaaggaagacaagccggcgtcttatgaaaaggctggtttctgttcagccctttgggaagaaaacccaatgacagttatcaagggagggggtgtgatgatacgtatccaaccgcacatccatcatggccctgaactcagcttccagggtttctctggggttccctcggccaagtggggatccactcagttaggtgggggggggggtgcttagaattttatttttatttctcattgcccagactggtctcaaaaccctggtctcgatcaatcctcccacctcagcctcccattctcttaatagtgcccttttagagagcaaacgttttgactttgatgaagtccagtttatcaacttgttcccttatggattgtgttttttggtgctctcagaaatctttccctaaaccaagggcacagattttctgttttcttccagaaattttgtagtgtcaggtttcacactgaggtggatattccttttgagttaatgtctgaccagctgggaggtgtcggtggaggctccctttctgcccgcgggttccagcacatttgctgggatggccctcctccctccacagcagagttctacccgccctcaccaccctgtatcaactcatctcatcgatatctcccaacggctggggaacaagggctgactcggctgcaatcatcctgcagccagactcggggacctaggactctgaacctccaactggtgtggcttcagggtccccaacttttcagaccccacctctgtgttgctctgcaagtggggatcagcagggctgtaccccaaatgctgcttgcttctcccgccctcctccctctccccatctgctcttggctgcacccccaaccctgacccaagtgtccttcacgctcagcaacgccacagcctctgacactccacggcactaaagtgtcaagagacccaggggacctgcgagatccatctcgccccacacaccaccaggtccccaggacttggaggatgctgatggcccagctctgggtcctaagcatggcagtatcacagcctcacaggcacatgtgtatgtgtgtgtgtgcacgtgtgtatgggtgcgtgtgcacctgtgtatatgggtgtgtgcacgtatgcacggatgtgtgtacacatgtgtatgggtgtgtgcatgggtgtgcacatgtgtatgggtgtgcatgtgtgtataggtgtgtgtatgtgtgcatgggcgtgtgtatgtgtgcatgggcgtgtgtgtacttgtgtatgggtgtgtgcatgtgattgggtgtgtgcatgtgtatataggtgtgtgtgcacgtgtatgggtgcgtgtgcacctatgtgtgtataggtgtgtgtgtttatgtatgggtgtgtgtgcacatgtgtataggtgtgtgtatgcgtgcacctatgtgtgtataggcgtgtatgtgtgcgcgtgtgtaggtgtgtgttcatatatatgggtgtgtgtgcacctatgtgtataagtgtgtgtgcacatgtgtataggtgtatgtatggttgtgtgtgtataggtatgtatgtgtgcacatgtgtgtaggtgtgtgtgttcatgtatatatgggtgtgtgtgcacctatgtgtataagtgtatgtgcacatgcgtataggtgtgtgtgttttatgtatgggtgtgtgtgcacctttgtgtgtatatgtgcatgtctatgtgtgcacatgtgtgtaggtgtgtgtgttcatgtatatatgggtgtgtgtgcacccatgtgtataagtgtatgtgcacatgtgtataggtgtgtgttttatgtgtgggtgtgtgtgcacctttgtgtgtatacgtgcatgtctgtgtgtgtttgtgggtgtgtgtgtacctatgtctgtataggtgtgtgtgtttgtgtctgggtgtgtgtgcacctatgggtgtgtgtgtgtatgcatgtgtgcatgtccctcacagggcagagctggaaagaactggagaggctgaggctggtcccttcatctcagggtgaagcacctttacccagagaaggagggtcgtggcctgggctactttgtgggctggagtcctggtctctgtcactgaaaaaagcaaggcagagcgtctgggaggggtgtcatgcggggctttctgagtcactggctgcgtgagatgtgagtaggtctgtgggatagggagctggccagggacttgagctccctgcctgctatgacctcagtcagcccctgcccattgtcaggctccttccctgtctaggggtacccagtagagctgcccagccctgccactccagcttgtttgaggaaaaagtgcaaccatgctgtgggtggaggcagatgtgattctgtcctcagaggcatgggggtgactccatggctctgagccaagttgcagctctggggcccttcttgatactccagggccccccatcaccccagcaccgagatgggcatgagcagaggggctcatggtgatggggtgggcgtggctgggagaagcctgcatatgaaggcctctgtcattggaggagactgtcccatgtccctccagatcatgtccctgagtggggagcgccttctgggcagagtggcacacagggtcccacccatctcaagtccatgggattaactcccctgtgctggaagctgcaggagctgctgcctgtggctgaggagaggccaggacgggccaaggagagcaggcaagagaaggggtggggctggcagggagggggctccattaattctgatgtcatttattgctgttcctatatttgtataataaatggaagaaaatagtggttgggggcttgctggggactcagggagggttggggacctccagggcttccattcgacctgaggcccatggtgcagtgagtcctgcctggagtcccgtccagcaggaggcaggagagctggtgtttggagatgtgaggggctgggccctcccaggtgagcgggttgggaaaggaaagggtctgtgctgggaaatccaaggggcaaggccgtttcccgtcctggtccgtcgttgagtcccctgccgtgggacagcgctcagcatggcacagacgctcagccgtgtcatgtggcttgtagagcgagggtgtgcggccggcatcatcctcagggaactctggagggactgggcctcagttggcctggcctggcgcggggctgccagccaagagccttcctccatcccattgagagccagggcaggtcctggagatggcagcctgcaggttgaagcccccgacagctgggggaggcattgctctgcacaggtagggccatggggcccgctggccagggtggccattgctcagtggcaccagctgggcagacagccgcatgcgctcaccactcgccctccacagatgggagcctgggagagccctgcctcccggaacggacatcctccttcaccaaatccgcaaaataggcctgatgccaggaacggggcactgcagggcccttgggagggaggtaagcgggcagccgggccaacctgctgcttggggaagggctgtggctggccccagcctcctaccgctggcccagtggtctctccacacatcacccagtgtggagtggttttttgtctttctttcgaaacaggctttcctcactgagggctcaccatggggctgtgctggggacactggatgtgtccagggtccgtcaagaagcgttgggggtagtcagggtctcagggaccactctgctgtcctcgagtctcctggtggtgaccagtggtgactcttgtggcgcccgggccacagctactttgttcacctcctaggagggaagagggcgagggtgagcctagggcagatgccagggcagtgaggctcacgtgggtctctttgcctgatgtgccggtgtccaggctgcagtgggcacccgagccctgtgggaagcctcctgggtctgcagctgagcaaaacagcagccgccagatgatgggccctaagtggctgcagatagcaggcaccattaaatgcagaggccatctgaggctgcaggctcagcacaggtggctttggtgcccttagggaggggcagcggtggagcccaggtctctgaaacatttatgacttcatgcgtcagctggaggctctttcaccgcccagacaaaaggcccttgcgtcagagtgttccatgtggggcgggagcttgggctgagagcttgggcccctgctcccagagaggcccagagctggggtggccacacctgctgggaatgctgctggtgggactaggttaaggcgagaaggaggtgtccatggccaggtggattagtgcagattgtgatggtgtggtggtgctcacggtgggggacttgcctatgggaacctcatcacagccccacatcgggcccttttacagatgggaaaactgaggcatggggtgcatagctagtgaggagcagagccagatgggaaccaggcgtcgacttcagagctgacctttgtgcatttgtgcattgtttgtgttgtgataaaatacacgtaacgtaaaattgacctttttaacccatgtttcatggtcttcggtttactcgcagtgctaggcgtccgacacgtctttctaattcctgaacatttccatcatccgcaagaggaaattagcagtcacccctttcccccatgcccccagctcctgacaaccacaagcccactttctgcccctggatttagctattctggatgtttcatgtgcctgaaatcatggcaaacgtggccctgtgtgtctggtttccttcaccgagcgtcctgtcttcactgtccgccgtgttataacacgcaagggaattcccttcctttctgagctgagtagtggtctgtggtgtggatggactacgtgcagctgtctctgcctttggctgttgtggctagaggctccttcctgaaagcctgatacttagaatggatttaaaaacaaattcaaatgtgtgttgcttatgaaaatcacaaaattaagtatgatgccatcaaaatgaaaaaatggctaaagattttcaagcacacacacctaaagatagcagacattccattcaaccttcatctcaaagaattagggcaaggagggcgattctaaatggctggagacatagtcagctgtgaagctgtaactttcatgaagacagtgacgtggtttgtcactgcccggatctcatcttgaattccctgtgttgtgggagggacctggtggggggtaattgaatcacggggacgagtctttcctgtgctgttctcgtaatagtgaatacgtctcataagatctgatggttttaaaaagaggcattccgctacacaagctctctcatgttttgcctgccaccatccacgtaagatgggacttggtcctccttgccttccgccatgattgtgaggcttccccagccacatggaactgtaagtccaattaaacctctttcttttgtacatttgctcagtcttgggtatgtctttatcagcagtgtgaaaacggactaatactgacaataaattaaaaactatttaaaatgcaaaggaaaatataaatttaaatcacctcttcgagtctctggtagatcaagaaaacaaaaataatctgaattattgatatagttaaattaatagatatatcaaactttgtaacttaaaagcaaaagatgtaccttttacagtgttcctggaacactcacaaacattgatcatatactagactgcaaaaacttcaagacattctaaaattaagaacctatgctggatatctctgatttcaacgtatgtttaaaatatatgttattaattacaagtttaattaatgaaagtctaaagaagaaaagtctacttagaagtaaaaacatcagcaatattactgtgtaatagatctgaacattaaaggggcatatatgcatatctgtacaccgaggcaaatttatagctacaggcattttccttttttgaaaaaagtaaatatgtaagttaaaaagttcacagtaagaaaagtgaatgtaaataagagataagaatagaaaataataggaaacaggaaaacagacttgagggttctttttgggaggtgattcttggttctttgaggaaaacaatatatatcttataatttcaatcatggaaaaaccccaagtatatatctaaatttagacatgagaaggctctttggcaatcgatttagaaaagttttgtttgtgtttttaagacagagtctcactcaatcacccaggctggagtgcagtggtgcaatcttggcttacagcaacgtctacctcccgggttcaagcgctcctcccccctcagcctcccaagtagctgggtttacgggcatgtgccaccacccctggctaactttttgtatttttagtagagacaaaggtttcattatgttggccaggctggtattgaactcctgagcacaagtgatccacccacctcggcctcccaaagtgctgggatcacaggcatgagccactgcacccagcccagtttttaatgtgacagtactttgtaaaattgtactccagtgaatttgaaaaatgttgtgagatggcttattctttgggaaaaaatgttaagtcaaaattaggaagaagtggagacaatctcagtatgtgtgagatgaatctgaaccctcatcagaacgtccacagctgacggtgaacacattggcaggtgagatatgtggagacatggcacgtggtgaaaatgcttggcaaagtgttcaaggcaggatggagataccgtatgggcattcactggacagtgttttcatcccgtatgtttgaacaatttttaatgtgggatcaaaggtaggaaatgctctttacaaagtcatcaaaaagttttttctggaaaagcctccagcccacggtgacctaggttcttcccaccattgaattaggatgccgtctgctactgagagagccagtcatgttagtggctcaatgggcagggtgcccaggttagctgtgaacaaagtgatctctctgctgcctcactagcagagagaaaagaaaactacagaccagtgatatgtacacagagagcaatgaaaatcctcattatgatggcagactaaacccatagtgtgttaaaaatgaccacacatgtaggctaggcacagtagttcatgcctgtaatcccaccactttgggaggctaaggtgggaggattgcctgagctcaggagaccagcctgggtgacatagtgagaccccatctctttttattaaaaaaaaaaaaaagaccatacatacacacatgcacacacaacagtggtaatggattataattcatgaaaaaagaatctatgcatccacagggacacacccatgtatataaacaaataagtggaagaaaggaatccagttctcacgttagaatcaacagggctggaaggccatcaaggaaaccccgtggcaggggcaggggttcaaagagctggtggttgtagtctcagtgtctcccaccaccacttactagttacaaaggaaaaagaatcactttctagaggcaaagctggcgacaccacccgagccaagtgatccaagttaacatcaccaggaatgggacaggccagcttcaccaccctccggatggacagcctcggtagcagaactcctgccaaagacacagctgtccagggtcgaatcatccggagacacagggcaaacccacatggagggagacacacacagtggcctgaatactttgaaaatgccagggccaaaaaacgtagaaggctaaataaagtaccgttcagggtgaaggggaaggaagaaatgtgatgcctaagtgggagtctatgattccactatgttatgtattagtccattttcaaattactgataaagacatacctgagactggataatttataaagggaagaggtttaattgactcacagttccacatggctggggaggcctcacaatcacagcagaagatgaaggaagaacaaaggaacatcttacatgatgacaggcaaagagataatgaaaactgagcacaaagggtttccccttataaaaccatcagatctcgtgagacttattcattaccatgagaacagcatggaggaaaccacccccatgattcaattatctcccacgaggtccctcccatgacacgtgggaattatgggagctacaattcacgatgagatttgggtggggacacagccaaaccatatcattccaccccggcccctccctaatctcatgtcctcacatttcaaaaccaatcatgccttcccaacggtgccccaaagtcttaactcatttcagcattaactcaaaaatctgcagtccaaagtctcatctgagaccaggcaagtcccttccacctatgagcctgtaaaatcaaaagcaagttagttaattcctagacacaattagggtacaggccttggataaatacacccatttgaaatgggagtaattggccaaaacgaaggggctaaaggccccatgcaagttcgaaatccagtggggcagttaaatcttaatgctccaaaatgatctccattgactccatgtctcacatctaggtcatgctgatgcaagaggtgggttcccatagtcttgagcagctctgcccctctggctttgcagggtacagcctccctcctggctgctttcacaggctggcattgagtgtctgcagcttttccaggcacatggtgcaagctgttgatggatctatcattctgggatctggaggacagtggccctcttctcacagctccactaggcagtgccccagtggggactttgcatgggggctccaaccccacttttcccttcctcactgccctagcagaggttctccatgaggaccccacccctgcagcaaacttctgcctggacatccaggcatttccatacatctctgaaatctaggcagagctttccatacctcaattcttgacttctgtgcacccacaggctcaacaccacatggaagctaccaagagttggggcttgcaccctctgaagccacagcccaagctgtaccttgacaccttttagctatggctagagcggctgggacacagggcaccaagtccctaggctgcacacagcatggaggccctgggcccagtccaggaaaccatttttgcctcctaggcctctgggcctgggatgggaggggctgctcctaaggtctctgacatgccctggagacattttccccattgtcttagtgattaacatttggcttcttgttacttatgcaaatttctgcaggctgcttgactttctcctcagaaaatgggtttttattttctatcacattttcagactgcaaattttctgaacttttatctctgtttccctttcaaaactgaatgcttttaacaacacccaagtcacctcttgaaagctttgcagcttagaaatttcttccaccaaataccctaaatcatctccctcaagttcaaagttccacaaatctctagggcagtggtaaaatactgccagtctctttgctaaaacatagcaagagtcatctttaatccacttcccaaaaagtttctcatctccatctgagaccacctcagcctggatttcattgtccatatcattatcagaattttggtcaagcccttcaacaagtttctaggaagttccagactctcccacattttcttgtcatcttctgagccctccaaactgtccaacctctgcctcttacccagttccaaagttgcttccacatttttgggtatctttacagccgcaccccactcccagtaccaatttactgtattagtccattttcatgctgctgataaagacatacctgagactgggtaatttataaagggaagaggtttaattgactcacagttccacatggctggggaggtctcacaatcatggcggaagatgaagaaagagcaaaggcacatcttacgtggcagctggcaaagagagaatgaaaacagagtgcaaggggttcccccttataaaaccatcagatctcatgagacttaattcactaccacgagaacaatatgggagaaactgcccccatggttcaattatctcccactgggtccctcccacaacacatgggaattatgggagctacagttcaagatgagatttgggtggggacacagccaaaccatatcagagttgaatcctgtctgggaagagatggctgcaatagccagtgtctgggcagctgatgatgtgagagtgtgaggtagagaactgtagtgtgcaatagagacctgtagtgtgcatgtcagtgttgtttcccgattttgacaacagtaccacatggttacagaagagaacacccttattcctaagaaatccatgaggaggcgtttagcagaaaacaggcatggtgtctccaagggctcagaaagattcaaccaaaagagggaagtctggagagggacaggatggagcaggacgggggcagtgtagaaaccgcaggcaagtctaagcagagcacgtttgggagttccttctgctattcttgcaacttctctataagtttgaaatgaaatcatataaatcgaaagttagaagagaattaccacatcatgttggatttcactcatagccacgagaacgggtggtggtctcttctgcagtgaactgatgcgatgtgtgatgtcactagttctcatccaaagcagatgacaattccagttactcctcaccagacataagaaaatgcttttagtagatcagtttttctgattgtaaagttcagaaatgttaatcagagaacgtgcagaaatttttaaagaagaaaagtaaaatgactcatcgtaccaaaagccagagatgccagcttttagtttcctgctagtctttttctcggcgtgtgtgtgtgcgcgcgtgcatgcacatgtttctacttggtctttgtgtgtgtgttaagggcgtgtacacacacagtgcagtcaggagtgagttgcacgtctacagctaggctgcttccccgaggctgtgtggccatcagccaggcgtccccaacccccaggccatgaagcactaccagtccatggcctgttaggaaccaggctgcacagcaggaggtgagtggcaggtgagcaagtgaagcttcatctgtatttacagtcactccccatcactcgcattaccgcgtgagctctgcctcctatcagatcagtggcggcattagattctcacaggggtgtgtaccctgttgcaaactatgcatgtgagggatctaggttgcctcctctttataagaatctaatgcctgatgatctgtcactgtctcccatcacccccagatgggactgtctagttgcaggaaaacaagctcagggctctcactgattctacattatggtgagttgtataattatttaattctatattacaatgtaataatagtagaaataaagtgcccaatgcaagtaatgtgcttgaatcatcccagaaccacccacaccactggtctgtggaaaaactgttttccatgaaaccagtcactggtcccaaaaaggttggggaccacggccatcggctgtttgctttatgaatttgtgcctcagtttcttcatctctgaaacgggaacgatgggagccctcacctcgtatggtggtttgaggattgaatgaactcattgtccagcacccttagcttcttgccagctcaggaagtgctgagcagggtaacccctatcactgcgtgtgtgtgtgtgtatatgtgtgtgtgtgcatacttgcctatgtgtgtctgtgcaaatacttggtaaaattgagagggtactagacaactcatttgtatcttcttaccttttgacacatggcagacatgtctcacatctgttcttcctccaaatgtgacctttcaatggctgcctggcatttcccctgtgttattgaacgtaatcaactctctattgacggctgggttatttcctaattgactgctgtaaatagcattgtgatgcaaatccttgtacactcatttttgcctggaactcaagattatttccttgggtcacatttgcaggagaagactgacaggatcaaagggttcctgcatttttatggctctgacacctttggccaaatcaccttccgggagtgttttcctaatttagcttcctactgtgctgctggacatcactgactccccccgccaacccccaccccacactgcaccacaaagctgggtattatcataaaaacactgccattatgatgaagcaaaaatagaatatccttcctcctcttagtgaggggagtatgtttatgtttgttgagctctttgtattttagccacccattcactggcccacctgcccctggtgcacctgcagcagcaagactgtcatctaggttgttggggaaaccaggagtgagtggagcacgagggtcaccctccaggaagtgacctgcaagagaatggagagagtcatggaccggcatggcgtggtaatgcatggtgcgtgtctcttagcagtaagaccttgagaaggagccaggcagggaggaatgggagggtgaaggagtgccttttgtggaggggagtcggacacagatgggatttcagcagagacctgatggaattgagggagtgggtggtgtgtgcttctgcaggaagagcacccagacagagggcatggcacatgcaaaggtcctgtgttgggaacgtgcttggtgcatgtgaagaactgtgcagggaaggtgctggagataggacgggagggccacgagggttaagatcctgagagcaatgcggggggtgtgagtgatgagggacaacatcagtcctctcttggcttctgtactttaaaaaaatcattttgttttgaagcaattttagacctacagaaaagttccacgacagtactgagagttcctgtggactcctagtattaacatcttaataacggggtgtattgaccaaaaccgacacctgatacattaccgtgaactcaactgcagatctgattcaaatcccgcgtttttctagcatccggtttctgttctgtgatccccacgttgctttcagctgccaggtctcctttcgtgtcctgcagcctgtgccagctcctcagtctctctttgtctttcgtgaccttgatgttttagataagtactgggcggctgttttgtagaacgtccctcggtttggattctctgatatgctctcatgattagatcaagattgtgcatttttggcaagaacaccgcgggagtgttgttgggtcccgaggagtccctgtggcagggctgtgtgaggtcagcatgtcttagggcgggttcatttgaccttgaccactcaggtaggagtgtgtcagctgggcttctcagctgtaaattaaccattttccgcttcataattagtaaacaccttgaggaagctacattgagacattgcagctgccttttttctcctgagattttgccccgctgattttagtgcccatcagctggttttgcttgtgacaggcaaagtctgtggtgcttgccaaatggggatttgtttatttcccactttctttctatgtttgttaatttggattcttctccaggaagagctgtcccctttgttctggttatgtatccagtggcttatgtatatcagcatggtttcatagatacttcttttgtgttatgggctataagccaatgctattattatttattttcctccatttatttatttatttagagacggagttttactcttgcacaggctggagtgcagtggcatgatctcggctcactgaaacctctgcctccggggttcaagtgattctcctgcctcagcctcctgagtagctgggattacaggcacgtaccaccacgcccaactaatattttgtatttttagtggagacggggtttcatcatgttggccaggctggtcttgaactcctaacctcaggtgatccacccgccttggcctcccaaagtgcagggattacaggtgtgagccactgcacccagcctcattatttattttcattgctcaaattgtgctggcttttgccccagaaacaaccttccattcagcttccatgcccctttggtgggccctgtcttttcttggacactgccttcctggcaccccaagatgctctgggctcagcttgtatttccttgcctcagtcttgaaatcacccacttctccaaggagccagggttccttccattggagagtggtctttagaaacccaggcctgggtgcatggtgtgctcatcgccactgtggacctgctgctctgcgcccactcggccgacggagctggggaatatgtgtatggcacccccacgtctacgcttctgtgttcatctgcagatatattcatacatgagtgggctcatactgtctccaactccagttctgccccagtggggccaattctctctctttgttgtaacacctttcttcaatagtgagaaacctggctctctcaccttcacctgctcgtccaaccccagctgcaagggaactggctccatacttgctgatgcgtgcccccatgagaagtgactgaccacccagagcctggcgcctgtgcatggcgtctgtgcacggcgcgtcttgtcttcagcctcactgcgtcccatcagtgcttttccccacggtgactttgagtatttctttacttctgtactcccttcagtgtgattatgtcattcatctgtgacatgtttagatttatctgttaggttggtattccattttgggtgtcccccgattctgattgtttttagttacttatctgggggtctgtgtgaagggaatgtaaagctgctgtgactcctggagtcagaggtgcacaaagagtgtcctcagaggagagccaggcgcccaccctgccagcccttccctccccactccatcccccacccccccaccctggacaaaaccagctcttcagcctttcatgtctctcttgcaggcctctcgcacagatgagaaaatacacgtgtgttttcctgtatcccctctttcttacaaaaagggaagcacactatcaatactcttgtagatctttaattgcggtaagatacactaatgcaaaatttaccattttaactatttttaagcacacagttcagtggcatgaagtacattgattttgttatgcaaccatcaccaccatccatttctagaattttctcatcctcccaaactgaaactccatccccattaaacaccaactcccccattctctcttccccagcccctggcacctaccatttacctttcgtccctatggatttgactaatccaggaacttcataaaagtgggatcattgagtactctatttgtcttttgtgactggcttatttcacttgggcataatgtcctgaaagttcactcatgctgtagcatgtgtcagaatttccttttccttttcaaggctgaataatattccactgtatggatagaccacattttgcttatccattcatcttttgatgaacatttgggttgcctccatgttttagctattgtgaataatgctactatgaatatgggtgtacaaatatcttttcaacgccctgctttcaattcttttgggtatatacccagaagtggaatttctggattatatggtaattatagttttaatttcttgaggaaccactatgccgttttccacagtagctaccacatcctcaccaacacttgtaatttctggggttttttaatagtagccattctagtgggtgtgcagtggtatctcattatagttttgatttacattttcttatgagtagtgatgttgagtatcttttcatgctcttattagccatttgtatatcttctttggagaatatctcctcagctcttttgcccacttcattaaattgagaggtttgtttttgctgttgagttttagaacttctctatatattctggatattaatcccttatcagatataggatttgcaaatattttctctcattctgtggggtgcctttttactccgttgatagtgtctttgtacaaaaatttttaatgttcacgaagtccaagttgtctactttttgttttgttgcctgtgcctttggtctttgtgttagtccatttagcattgctataaaggaatacctgaggctggtaatttataaagaaaagaggtttaattggcttatggttctgcaggctgtacaagaaacatggtgccagcacctgcttctggcgagagcctcaggaagcttccaatcacggcagaaggtgaagcgggagtaggtgtctcatatgatgagacagggagcaagagaaaggaggttccagtctccttttaacaaccagatcttgcatgaactcattacctaatcatggggaatctgcccctatgacccaaacagcacccaccaggccccacctccaacgctggggatcacatttcaacatgagagttggaggggacaaatatctgaactctatcaatgttatatccaagaaatcatagccaaatccaatgtcatgaagcttttgccctatgttttcttctaagatttttatagttttacgttgcacatttagatatttgatccattttgagttaatttttgtatatggtgtgaagtaagggtccagcttccctcttgcatgtggatttccagttttcccagcaccatttgttgaaaagacagtccttttctcattgaatagtcttggaaccctagtcaaaaatcatttaaccatttatgccacggtttatttctgggctgtctcatgttccattggtttatatgtctgtctttttgcctgtgtcacactgtcttgattactgtaagtttatagtaaagttttgaaatcagaaagtgttaggcttccagcttggcttttctttttcaatattgcttttggctattttaagttccttgagattccatatgaattttaggatgggtttttctatttttgcaaaaagtgtcattgggattttgagagggattgcactgaatctataaatcactttgggtagtattgatatctcaacattgtcttctaatccatgaacatgggatatgtttccatttatttgcatctttttaagtttctttcagtaatgttttgtgggttttgctgcagaagtcttttacctccttggttaagttaattcctaagtattctacttgatgctattataaattaaattgttttcttaatttcatttttagattgttcattgttagcatatagaaatgcaactgattttgcatgtttaccttagattctgtaactttgctgacttcatttattagctctaataagtttttgtggaatctttaggggtttctacatatgagattatgttatctgtgaatagaaatagttttacgtcttttttttccattctggatgccttttatttcttttaatttttttcttgccaaattgctctggctagaattttcagtacaatgttgaatagaagtggtgaaagtggtcaccctggccttattcctgaccttagagggaaaaatttcagtctcatcattatgatgttagctgtggattttcacatatggtttttattatgttaaggtagtttccttctattcctagtttgttgagagtttttaataaggatgttgaattttgtcaaatgctttttgtatcaattgagatcatgtgatcatgtgagtgttatttcttcattctgttaatatgctcttttacatggatttatttttgtatgttgaaccatccttgcattccaggactaaatctcacatggtcatgatatgtaatactttaactatgtttctgaactcagtttgctattttgttgagaattttgcatcagttttcataagggatattggtctgtagttttcttgtagtctttgtctggctttagtatcagagtaatgctctcctcatagaatgagttagaaacctttcccctcctctttaattttttgggaaagattgagaaggatgggagtttattctttaaatatttggtaggattcattggggaagccatcaggtccaggcttttctttgttgagagttttttgattactgattcaatctcctcactagttataggtccatgaagattttgtatttctttgtgatttagttttggtaggtttcgtgtttctcagaatttgtccatttcatctaggttatccaatttgttgatacacaattgttcacaatactctcttataatcctttttatttctgtagaattgatagtcatgtccctattttcacttctgatttcagtagtcttctctcttttttacttagtccatctagctaaaggtttgtcaattcttaaaatcttttcagagaagcaactttgatttaattgatttttctctattgtttttctattctctattttgttggtctctgctgtggtatttattatcttctttcttctgctagctttgggtttagttcttttgctagttccttaagtggtaaagttaggttatttactggagatctttcttgtttattaatgtaacaatttatagggagggagtggagcaagatggccaaatagaagcctccaattgtcctccccaacaggaacaccaaatttgagaactatctacacaaaaaagcaccttcataagaaccaaaattcagataagcaatcacagtatctgcttttaactttatattgctggaagaggcactgaagagggcaagagagacagtactgaatcactgacagcactgtgcctcccatcccccagctatgtggcatggagagagaatctgagagcttgggggagggaaagtgcagtgctttgggactgtccatcgagctcagtgattccctgttgccacagaaagcagaaccaggctaaattcagcccacacccagcacagagggagcatttaaaccagccctagccagaggggaatcacatatctcaggggtcagaaactgagttccagaaaaccttgccaccacgggctaaagtgctctggggttctaaataaacttgtaaggcagtctaggccacaataactgcaattcctaggcaagtcctattgctgagatgggctcagagccagtggatgtggggggcacacaacctagtgagacaccagccagggtggctaaccccaggcagcacagctcacagaaacaaaagtgactcttttcctctgcttaaagagaggagatggagcagtaaagagaacattgtcttgcatcttggataccagctcaaccacagtaggagaggacactgggcagagtcaatgggcacacatttcaggccctggctcttggacatttccagacacaccctgggccagaagggaatccactgccttggagggaaggacctagtcttgtcagaattcatcatcagctgactaaagagcccttggaccctgaacaaccagcagtgccaggtagtatcctgtgggccttgaatgagattctgaaatatactggcttcaggtaccagcttgaccacagtggggtagagcaccaaatgggctcttggggtccctgattccaggccttggctcttggacagcatttctggacctgctctaggccagaagggagcccactgacctgaaaggtgagtccacagcctagaagccttcaccacaagctgactgaagagccctcaggccttcagtggacaaccatggtagcctgacagtactgcctatgggcctgtagtggtggtggccacagggagaggctcctttgcctatggaaaggagaaggaattctgggtatgactttgtcttgtgctactactgagtgccagcttagcctctgtagtataccacaccaggtaggtttctaaggtctttgactacagacccttgctcctggatggcatctctggacccaccttggacttgggggaactcaccaccctaaagtgaaggacaaaagcctggctggctttaccatttgctaattgtagagccctggggctttgagtgaacataggtggtagccaggtagtgcttacagcgggccttgggtgaaacccagtgatgtgttggcttcaggtctgaccagcacagtcccagtggtggtggccacaggtaagcttgtgtcactcctccccaagcttcaggtggcttagcatagagagagagtccatttctttgggagaaagtaagagaagaaaacaagagtctctgcctcgtaatgcagagaattcttctggatcttatctaagaccaccaaggcagtattttttttaatatttattttttgaaacagagtttcactcttgttgccaaggctagagcgcaatggtgtgatctcagctcaccgcaacctctgtctcccgggtttaagcgattctcctgcctcagtctcctgagtagctaggattataggcatgtgccatcatgcctggctaatttttgtttgtttgtttgtttgtttgttttagtagagacagggtttctccatgttggtcaggctggtcttgaactcccgacctcaggtgatctgcccgcctcggcctcccaaagtgctgggattacaggcgtgagccactgcgcctggccccaaggcagtatttttatgagtctgcaagaaccacagtgttactgggcttgggatgctgcctaatgcagatacggcttagatcacaacacccaagtccctttgaatacctggaaagctttaccaagaaagatgggtacaaacaagcccagactgcaaaggctacaataaatacctaactctttaatgcctagacaccaatgaacaagaccatctaggaaaacatgacctgaccaaacaaactaaataaagcatcagggaccaatcctgaagaaaagagatatgtgacctttcagagagagaatttaaaatagctgttatgagaaaactcaaattcaagataacacagcgaaggaattcagaattctatcagataaatttaataaagagattaaaataagaatcaagcagaaattctggagttgaaaaatgcagctgacatattgaagaatgtatcagaatctcttgataacagcattgatcaagaacaaaaaagaattagtaagcttgaagacaggatatttgtaaatacacagaggagacagaataagaacgaatgaagcatgatctagaaaatagcctcaaaagggcaaatctaagatttattgaccttaaagaggaggtagagaaagagataggggtagaaagcttattcaaagggatactaacatagaacttcccaaacctagagaaagataccaatattcaaatacaagaagattctagaataccaagcagatttaacccaaagaagactacctcaaggtatttaatagtcaaagttccaaaggtcaaggataaagaaaggatcctaaaagcagcaagaaaaaaaagacttataattgaactccattatatctggcagcagagttttcaatggaaactttatgggccagaagagagtggcaggacatatttaaggtgctgaaggaaaaaaaagaaaaaaacttttgctctagaatagtatatctggtgaaaatatccttccaacatgaaggagaaatacagaccttcccagacaaacaaaagctgaggatgtcatcaacaccagagctgtcttacaagaaatgctaaagggaattcttcaatctgaaagaaaagggtgttaataagcaacaagaaatgatgtgaaggtacaaaactcactggtaatacatacacagaaatacaaatagtattataacactgtaattatggtgtgtaaactactcatatattaagtagaaggatgaaaagaagaactgataaataatgactacaacaacttttgcggtacaataggcagtacaataagatatagagacaaaaaaacttaaaaagcggagagacaaaagttgaagtgtagagattttttgttttactttaagttctggaatacgtgtgctgaacgtgcaggtttgttacatacgtatacagtgccatggtggtttgctgcacctatcaacccatcatctaggttttaagccctacatgcattaggtatttgtcctaatgctctccctccccttggcccccatctccccacagatcccggtgtgtgatgttcccctccctgtgtccgtgtattctcattgttcaacttccacttatgagtgagaacatatggtgtttggttttctgttcctgtgttagtttgccgagaatggtttccagcttcatccccacaaaagacatgaactcattctttttttatggctgcatattattccatggtgtatatgtgccacattttctttatccagcctatcattgatgggcatttgggttggttccaagtctttgctattgtaaatagtggtgcagtaaacatatgtgtgcatgtgtctttatagtagaatgatttataatcctttgggtatatacccagtaatgggattgctgggtcaaatggtatttctagttctagaatctagttctagaatcaccacgctgtcttccacaatggttgaactaatttacactcccaccaacagtgtaaaagcgttcctatttctccacatcctctccagcatctgttgtttcctgattttttagtgatcgccattctaactggcatgagatggtatctccttgtggttttgatttgcatttctctgatgaccagtaatgattagcttttttttccatatgtttcttggccacataaatgtcttcttttgagaagtatctgttcgtatcctttacccactttttgatggggttgtttttttcttgtaaatttaagttccttgtagattttggatattagaccttgtcagatggatagattgcaaatattttctcccattctgtaggttgcctattcactctgatgctagcttcttttactgtgcagaagctctttagtttaattagatcccatttgtcaattttggcttttgttgcaattgctcttggtgttttagtcatgaagtccttgcccatgcctatgtcctgaatggtattgcctgggtattcttctagggtttccgtggttttaggttttacatttaagtctttaatcatcttgagttaatttttatataagttgtaaggaaggggtccagtttctgttttctgcatatgactagccagttttcccagcaccatttattaaatagagaatcctttccgcattgcttttttgtcaggttggtcaaagatcagatgattttaggtgagtggtgttatttctgaggtctctgttctgttccattggtttatatatctgtcttcataccagtaccatgctgttttcgttactatagccttgtagtatagtttgaagtcaggtagtgtgatgcctccagctttgttctttttacttaggattgtcttggctatatgggctcttttttggttccatatgaaatttaaagtagttttttctaattctgtgaagaaagtcaatgatagcttgatgggaatagcattgaatctataaattactttgggcagtatggccattttcatgatactgattattcctatccatgagcatggaattttttttccatttgtttgtgtcctttcctttccttcagcagtggtttgttgttctccttgaagaggtccttcacatcccttgtaagttgtattcctaggtattttcttctctttgtagcaattatgaatggggattcactcatgatttggctctctgcttgtctatttttggtgtataggaatgcttgtgaattttgcacattgattttgtatcccaagactttgctgaagttggctatcagcttaaggagtttttgggctgagacaatggggttttctaaatatacaatcatgtcatctgcaaacagagaaaatttgacttcctcttttcctatttgaatactctttattttttcgcttgccttattgtcctggccagaacttccaatactatgttgaatgggagtggtgagagagggcatccttgtcttgtgctggttttcaaagtgaatgcttccagcttttgcccgttcagtatgatattgcctgtgggtttgtcataaatagctcttgttattttgagatatgttccatcaattcctagtttattgagagtttttggcatgaagggatgttgaattttgtcaaaggctttttctgcatctattgagataatcatgtggtttttgtcattggttctgtttatgtgatgtttagtgatttacatatgttgaatcagccttgcatcccagggatgaagcccacttgatcaccatggataagctttttgatgtgctgctggattcagtttgccagtattttattgaagatttttgcatcggtgctcatcagggatattggcctgaagttttctttttttgtgtgtcgctgccaaattttggtatcaggatgatgctggcctcataaaatgagttagggaggggtccctctttttctactgtttggaatagtttcagaaggaatggtaccagctcctctttgtgcctctggtagaatttgggtgtgaatccgtctggtcctgggctttttttggttggcaggctattaattactgcctcaatttcagaacttgttgttggtctattcagggattcgactttttcctggtttagtcttggagggtgtatgtgtccaggaatttatccattttttctagattttctagtttatttgcatggaggtgtttttagtattctctgatggtagtttgtatttctgtgggatcagtggtgatatcccctttatcattttttattgcatctatttgattcttctctcttttcttctttgttagtctggctggcagtctattttgttaatcttttcaaaaaaccagctcctggattcattgatttttttggaagggtttttcatgtctctatctccttcagttctgctctgatcttagttatttcttgtcttctgctagcttttgaatttgtttgctcttgcttctctagttcttttaattgtgatgtttgggtgtcgatttcagatctctctagctttctgatatgggcatttagtgctataaatttgcctctaaacactgctttagctgtgtcccagaaattctggtacgttgtctctttgttttcatttgtttcaaagaatttctttatttctgccttgattttgttatttactcagtagtcattcagtagcaggttgttcaatttccatgtatctgtgtggtttttagtgagtttcttcatcctgagttctaatttgatcgtactgtgttctgagagactgtttgttatgatttccattctttggcatttgctgaggagtgttttacttccagttatgtggtcaattttagaataagtgctatgtgatgctgagaacaatgtacattctcttgatttggggtggaaagttctgtagatgtctattaggtccgcttggtccagagctgagttcaagtcctgaatatccttgttaattttctgtctcattgatctgtctaatattgacagtggagtgttaaagtctcgcactgttattgagtaggaatataagtctctttgtaggtctctaagaacttgttttatgaatctaggtgctcctgtattgggtgcatttatttaggatagttagctcttcttgttgcattgatccctttaccattatgtaatgctcttctttgtctttttttatctttcttagtttgaagtctgttttatcaaaggctaggatcttggccgggtgcagtggctcatgcctgtaatcccagcactttgggaggctgaggtggttggatcacgagatcaggagatcgagaccatcctggctaacacgatgaaaccccatctctactaaaaatacaaaaaaattagtcaggcatggtggcgggcacctgtagtcccagctactcggcaggctgaggcaggagaatggcgtgaacccgggaggtggagcttgcagcgagccaagatagcgccactgcagtctggcctgggcaaaagagtgagactccatctcagaaaaaataaaaaataaaaaataaaattaaaaaaaatggctaggatcacaacccctgctttttttttttttttttttttttttgctttccattgcttggtaaatattcctccatccctttattttgagcatatgtgtgtctttgcacatgagatggatctcctgaataaagcacactgatgggccttaactctttatccagtttgccagtctgtgtcttttaattggggcatttagcccatttacatttaacgttaacattgttatgtgtgaatttggtcctgtcgtcatgatgctagctggttattctgcacattagttgatgcagtttcttcatagtgtcattggtctttatattttggtgtggttttgcagtggctgatactgctttttcctttccatgtttagtgcttccttcaggagctcttgtaaggcaagcctcagcatttgcttgtttggaaaggattttatttatcctttactcatgaagcttagtttggctggatatgaaattctgcttgaaaattcttttctttatgaatgttgaatattggctcccactctcttctggcttgtagggtttctgcagagagatttgctgttagtctgatgcacttctctttgtaggtaacctgacctttctctctggctgcccttaacgttttgtccttcatttaaaccttggagaatctgacaattatatgtcttggggttgctcttcttgaggagtatcttagtggtgttctctgtatttcctgaatttgaatgctagcctgtcttgctaggttggggaagttctcctggataatatcctgaagtgtgttttccaacttggttccattctccccgtcactttcaggtacagcaatcaattgtaggtttggtcttttcatatagtcccatatttcttggaggttttgttcgttctttttcatcattttttctctaatcttgtctgcatgccttatttcgttaagttgatcttcaatctctgatatcctttcttccacttgattcatttggctattgatacttgtgtatgcatcacaaagttctcatgctgtgtttttcagctccatgaggtcatttatgttcctctctaaactggttattctagttagcagttcctgtaaccttttatcaggttcttagcttccttgcattgggttagaacatgcttctctagctcagaggaatttgttattacccaccttctgaagcctacttctgtcaattcgtcagtctcattctccgtccagttttgtgcccttgctggagaggagatgtgatcatttggaggagaagaggcattctggtttttagaatgttcagcatttttgtgctggtttttcctcatctttgtggatttatctgcctttgctctttgaggctgatgacctttggatggggtttttgtgtggggggtcccttttgttgatgttgattttgttgctttctgtttgctagcttttcttctaagagtcaagcctgcagtcctgcaggtctgctgcagtttgctggaggtccactccagaccctgtttgcctgggtatcaccagtggaggctgcagaacagcaaagattgctgcctactccttcctctggaagctttgtcccagaagggcaccagcctgatgccaaccagagctctcctgtttgaggtgtctgttgacccctgttgggaggtcttgcctgctcaggaggcatggggctcagggacccacttgaggaggcagtctgtcccttagcagagctcatgcactgtgctgcgagaatcccccttgtcaggatcagctgctctcttcagagccagcaggcaggagagttcaagtctgctgaagctgtgcccacagccaccccttctccaggtgctctgtcccagggaaatgggagttttatctataatcccctgactggggctgctgcctttctttcagagatgccctgcccagtgaggaggaatctagagaagcagtctggcctcagctgctttgctgtgctttggtgaattctgcccagtccaagcctcccagcctccttagcactatcaggggaaaaccgcctactaaagcctcagtaataccaaatgcccctcccgccaccaagcttgagcatcccaggtcaacttcagactgctgtgctggcagtgagaatttgaagccagtggttcttagcttgctgggctccatgggagtgggacccactgagtgagaccacttggcttcctggcctcagccccctttccaggggagtaaatgattctgtcttgctggggttccaggcaccactggggtacagaaaaaactcctgcagctagttcaatgtctgtccaaacagcaactcagttttgtgcttgaaacccagggccctggtggtataggcacatgaaggagtctcctgatctgcagattgcaaaacccatgggaaaagcatagtatccaggccgggtatcacagtcccgggtatcacagatgacgggttgatgggtgcagcaactgcatgcaaactgcatgtttgcagttccctcggctgggggagggaggtctcccggctccttgcacttcccaggtgaggcgatgccccacctgcttctgtgtgccctccgtgggctgcacccactgcctaatcagtcccaatgagatgaacttggtacctcagtcagaaatgcagaaatcacccagtgttgatctcactgacagctacagactggagctcttcctattctgccatcttgccagatgtaaagtgtagaatttttgattttgtttttttgcttgtttatgcaattagtgttaagtcatcatcagtttaaaataatgagttgtaagatattttcaagcctcatggtaacctcagatctaaaacatatggcagacacacaaataaaaagcaagaaattaaagcatgccactagagaaaatcaccttcactaaaaggaagacagaagggaagtaacaaaggaagagaatatcttcaccagaaaacaaataataaaatggcaagagtgagtccttacgtatcaataataatattaaatgtaaatgggctaaccttgccaatcaaaagacagagtggttgaatggacccctgcccccacaaaaaaagacccaattatctgttgcttacaagaaacacatttcaacctataaaaatacacatagactgaaaattaagggcttgaaaaaagatattccgtgccaatagaaaccagaaaagatcaggagtagctatacttgtattaggcaaagtagagttcaagataataactataagaagagacaaagaaggtcattacatcatgataaagggatcaattcagcaagacgatataacaatttcaaagaaacatctaacttaatctgcactgtagaccaaatatacctaatagatatttacaggacatttcatccagcaattccaagagaagaatacacattctcctcagcacatagctcattctcaaggatagaccatatgttagatcacaaaacaagtcttgaaacattctaaaaaattgaaatactatcaagcatcttctctgaccagtacagaataaaactagaagttaataatgagacattttggaaactatacagacatacacatagtaattaaacaatatgctcctgaatgaccagagggtcaaggaagaaattaagaaggaaattgaaaattttattgaaataaattacaatggaaacacaacttaccaaaacctgtgggatttgtttgtgtcttttttacttccttgagcagtggtttgtagttctccttgaagatatgaacagacacttctcaaaaaaaagacatttatgcagccaaaaaacatatgaaaatgtgctcatcatcactggtcattagagaaatgcaaatcaaaaccacaatgagataccatctcacaccagttagaatggcgatcattaaaaaatcaggaaacaacagatgctggagaggatgtggagaaataggaacgcttttacactgttggtgggagtgtaaattagttcaaccattgtggaagacagtgtggcaattcctcaaggatctagaacccaaataccatttgacccagtgatcccattactgggtatatacccaaaggattataaatcattgtattataaagacacatgcacacatatgtttattgcaccactattcacaatagcaaagacttggaaccaacccaaatgcccatcaatgataggctggataaagaaaatgtggcacatatacactgtgaagtactatgcagccataaaaaaagatgagtttatgttcttttcagggacacggatgaagctggaaaccatcattctcagcaaactaacacaagaacagaaaaccaaacaccacatgttctcactcataagcgggagttgaacaaggagaacacatggacacagggaggggaacatcacacaccggggtctgttggggggtgggggcaaggggagggagggaattaggagaaatacctaatgtagatgacgggttgatgggtgcagcaaaccaccatggcacgtgtatgcctatgtaacaaaactgcatgttctgcacatgtaccccagaacttataaaaatcctgtgggatacagcaaaagcagtattaagagggaagtttctagttaaaagcacctgcatcaataaagagaaaaacttcaagtaaacaacctaatgatcttaaagaacaagaaaagcaagagtaagtcaacctaaaattagtagaagaaataataaagcttagagcagaaatacatgaaattgaagtgaagaaaacaagacaaaagatcaacaaaataaaaagttggttttttttttaaaagataaaattgacaaacctttagccagactaagaaaagaagagggaagatccaagtaactaaagtcagagacaaaaaaaggagacattacaactgataccacagaaattcaaaggataattagtggctgctatgagcaactctatgccaataaattggaaaatctggaagaaatggatacattcctagacatgtgcaacctaccaagattgaaccaggaagaaatgcaaacctgaacagaccactaagcagtaatgagattgaacctgtaatttaaaaatcttccaacaaagaaaaccctgagacttgatggcctcactgctaaattctgccaaagatttcaagaactaatactaatccttctgaaactattatgaaaaatagaggaggagggaatacctccaaactcatctacaaggcccgtattaccctgttaccaaaaccagacaaagatacatcaaaaaaaaaaaaaaaaaaaaaaaaaaaaaggaaccacgggccaatatccctgataaatattgatgcaaaaatcctcaacaaaatactagcaaagcaaattcagcaacaccttaaaaaagatcactcttcatgaccaagtgggagttatcccaggaatgcaaggatagttcaacatatgcaaatcactttatgtgatacatcgtatcaacagaatgaaggacaaaaccacatgagcatttcaattgatgctgaaaaagcacttgataaaattccacatcccttcaacataaaaactgtcaaaaacctaggtatagaaggaacatacctcaacataataaaagccatatatgacagacccacagctagtaacatactgaatggggaaaaactgaaggcctttcctctaagacctggaacatgacaaagatgcccactttcatcactgttatttaacacagtagtggaaatcctagctagagcaatcagacaagagaagaaaataaagggcatccaagttggaaagaaagaagtcaaattatccttgtttgcagatgatgtggtcttatatttggaaaaatctaaagaccccacaaaaaaactattagaactgataaattcagtaaagttgcaggatacaaagtcaacatacaaaaatcagtagcatttctatatgccaacagtgaacaatctgaaaaacaaatcaagaaagtaatcccatttaaaatagctacaaataaaatacctaggaataaacttaaccaaagaagtgagagatctctacaatgaaaattataatacactgatgcaagaaattgaagaggacccaaaaatggtaagatatttcatgttcatggactggaagaatcaatattgttaaaatgtctgtattgtctaaagcaatctacagattcagtgcaccccctatcacaataccaatgacattcttcacagaaatagtaaaaacactcctcaaacttatatggaatcactaaagtcccagaatagtcaaagctatcctgagcaaaagaacaaaactggagggagcacattacctgagttcaaattatactacagagtcatagtaaccaaaacagtatgtactgacataaaaacagacacgtagaccaatggaacagaatagaaaacccagcaaacaaatccatatgtctacgacaaactcatttttgacaaaggtgccaagaacatgcattgggaaatggacagtctcttcaataaacgatgctgggaaaactggatgtccatatgcagaagaatgaaactagacccctatctctcaccatataaaaaaaacaaatcaaagtgaattcaagaattaaatctaagacttcaaactatgaaactactaaaaagacattggagaaactctccaggacattggagtgggcaaagactgcttgagtaatccctacaagcacaggcaaccgaagcaaaaatggacaaatgggatcacatcaagttaaaaagcttctgcacagcaaaggaaacaatgagacagcctgcagaatgggagaaaatatttgcaaagtgcccatctgacaagggactaataaccagaatatgtaaggagctcaaacaaccgcacaaggaaaacatctaataatccaattaaaagatgggcaaaagacctgaatagacatttctcgaaagaagacaaatggatgaaactggaaaccatcattctcagcaaactatcgcaaggacagaaaaccaaacaccgcatgttctcactcataggtgggaactgaacaatgagaacacatggacacaggaaggggaacatcacacactggggactgttgtggggttggggggaggggggagggatagcattaggagatatacctaatgctaaatgacgagttaatgggtgcagcacaccaacatggcacatgtatacatatgtaacaaacctgcacattgtgcacatgtaccctaaaacttaaagtataataataataaaaaaacaaatgacaaataaataaatgaaaaggtactcaacgtcactgatcatcagagaaatgcaaatgaaaactataatgagatatgaccccaccctggtcaatatagcttttatccaaaagataggcaataatggatgctagtgaggatgtggagaaaagggaatccttgtacactgttggtgggaatgtaagttactacaaccaccgtggaggacagtttcgaggttcctcaaaactaaaaatagagctacctctgatccagcagtcccactctagttatatatccagaagaaagaaaatcagtccagcagagaaggatccgcactcctgtgtttattgcagcactattcacaatagccaagatttgggagcaaactgagtgtccatcaacagatgaatggataaagaaaatgctgtgtatacacgcaacggtatactagttagccatgaaaaagaatgagaacgtgtcatttgcaacaacatggatggaactggaggtcactatattaagtgaaataagccaggcacagaaagacaaactttgcatgttctcacttatttgtgggagataaagattaaaacaattgaactcgagatagagtaaaaggatggttaccagaggctgggaagggtagtgggggttgtgagggaagtagagatggttaatggaaacaaaaaaaaaatagaaaaatgattaaaacctggtatttgatagcacaacagggtgactatagtcaatgatttaattatacatttaaaaataactaaaagagagctgggcacagtggctcacagctgtaatttcagcactttgggaggccgagtcatatgactcacttaaggccaggagttcgaggcctgcctggccaacatggtgaaacccccttctctacaaaaaacaggaaaattagctggacttggtggcatacacctgtaatcccagctacttgggtggccgaggcatgagaatcactcgaactcaggaggcggaggttgcagtgagctgagatcgcgccactgcactccagcctgggtaacagagtgagactgtctctaaataaataagacgaaaagagtataatgaggttgtttgtaagacaaggggtaaatgtttgaggtagtagatacccccatttacctctatgtgattattatgtactgtctgtctatgttagaatatctcatggaccccataaacctatacacctactatgtacccacaaaaagcaaaaagaaaaagagcttatgggtatcaatttttctgttagtaacgcttttgttgtgtcccagcaagttttggtacattgtcttctcatctttatttgcatttaagtattttctaatttcccttctgattttttttttttttaatttaagtcccaggacacatgtgcaggacatgcaggtttgttacgtaggtaaatgtgtgccacggtggtttgctgcacctgtcaacccatcacctaggtgttaagccctacatgcattaactatttattctgatgctctctctccctctgcccccctttttctttgattcattggttaagagtatgttgtttcatttccatacatttgttaatttttccattttacttctattattgatttctaagcttatcccattatcgttggagaagatcctttgtatgactggcatctttttgagtactttgagacttaattcgtggcctgatctctcctgggaacatttccacgtgcacttgggatgcacatgcatgctgtggtcatgggtcgagtgttctctgcatgttggttagatctaggtggcttattgtgttaagtcctctattctgtaacttatcttctgcctggttgttctattcattatagagaatgtggtactgaagtctctcaccatcattgtagaactatttctcccttcggttctgtaaatttttcctttgtgtcttttgatcgttagctgttagaggcataaatgtttataatggttatctgtaacatcttcttgcagcctcgaacctttaagtgtgcagcgtcctcttttgtctcttgtgacctttctaggtttattataaaaccatttttggctgatgttagtgtagccactctgctttttgtgtttgccatttgcatggaacctctttctccactctttccaccctttcactttcaatctttttgtgtctttggctctaacgcgagtctctagtagacagcatgtagctggatcatgtttatctattctgccactgccgatatcaccttttgatatacagactttacattttcataaaatttaatttgtccacgtgcttagcccctgtgatccagcaatcccactgctagttatatatccaaaaagaaagaaaatcagtccagcagggacagatgcgcactcctacgtttactgcggcactgttcaccggagcctgtgccttcaatgtcgtattcaagaaatcatcctcaaatccaaagtctttctattttctcctatgtgttcctattgctttaggtcttacatttatacctttgacccatattgagttaattttttatatccagctttattcttttgcatgtagatactcagttatcccaccatcatttgtcgaaaagactatacgtgaactttttgaatttgcttttctcacgtaatagtatttcctagagaccactacatatcagttcgtggggtccttccatattcttttttacagccaccccatactttatggttggatgtgccatgcttattcaaaccctctcctatttatgggcatttaggttgttctgatattgtgcaatgataaataatgttgcaaagtatagccttatacatatgtctattgtattcttgaaacaatgttgcaaagaataacttcgtaggtatggatgttcctattgttggaggtgttatcttcagggtagattcctagaaatgggagtgttgggctgaaagagaagcccgtagttttgttggatgtgaccaaatttccctgcagaacggttgcacatttgcactcccccagcaatgcatgagcataccggttttttctacagttgcgccagcagcgtgctgtcacaccactttttgccaggtccatagctttgttttaatctgtatttctgtaattacattgaatttgaatgttttccctgtgtctaaaagtcatgtgtgtgtgtatttgtaaatcgtctgtcttctcatttccaacttcttccattgggtttttggttcttggtctctcaatttttaagtcatttatattgtgggaacgtttgtctggactaatgtgaattgttttcccagctggtcacttgtctttgactttgcttatggtgctttttgctatgagaaatttcgcatgtttatatcatcaaatttatcatgcttctttctactgactccggattcagggccacagttgagagctttttcctccaccgaggttaaggggaatccactgtgttttcttctggaggtttggggtcttgtcttcagcatttagctccttgtccgtttggagtttgctcttgtgcatgatctaaggtaatcttttctcagagagtggcctgagacctcttccttagaagttcaccccactggctggggccttcacgaggcccctctggcctctaagtggagcatggagtgtggggtcatcgggcaggacacgagatgcgcaggaggctgtgactgaggtggctgtgggatgggacggcgtggtttgctctagagggtttgaaggaagggtgagaagtcaggaccactgctgtagaaaacagggtttgcaggtagataaggtggcgggtgcagcgggaggaagagaaaaggatgctgctgggacccctcgcacctgggaggatgcactttctgtttctgacatgggtcagggttggggcgaaggagtccagctggggacatgttattttggaggtgtttgtgaggcagccaggtgaggtgggttgaaggcagtaagacctgcaggtgggagctctggggagagagtgcgggctgggctcacaagttaggggaggtgtcagtgtgtaaatgacatgagcgcaggggctagacagggcctcctgtagcctgggtgggtggaagggcagagggcaagggccaagtgatggcagctgtggaggctgagggcaaggaaggcaagtccgggaggttgggtgtcctgcagcctccacaggggcaatggaggaagaacaaaggactctgtgttgagccctcctgagaggttttggaactggccttgacttggtgatgtggggttatgagttttattccacacacgtatgtgggagtctgggtcctggtgggtcccagccccgtacatggaggctgggaccctgccctgaaacctctcagacacaaacacccagctcggccccacagagctggcctgggccccagcaggggtctgtgttgccttggccccacggcagtggagctggggtttcccagggatgctgctgctgaaggtgaggtttgcaaacactaggcatgcatgtttgaggtaccacaacctccaccaacccatggtggtcaccaagggtctttgggctcctgtggggaccatactggcttgtctgacttgccgttacccggcggagatatgtcttggaaagactttaggccaggagcccatcattgtcctggaacctgggcttggcagggcaagctttggggagcactgtccagacagtgccctggacactgcacctcaggtcaggacacagctcccgaggcctggctgctctgcatggggaggagtgtgggtcctgagtggagtgtcccatctgtcatgcagagagggtgatgatataaccagctgggtgttcgcacctgagaggtttcggggcagggtcccagcctccatgtacggggctgggacccaccaggacccagactcccagactagcaggtgggcttctcagagcacagagggtgtgggtgacccagatatcctgttgttgctcagagacccccagggaatccttgaagatggcagtgaccacctggcttcctctatagaaactccccgaatgggagggatgggaaagactgttgaactaagctttttaggaagaaagccatcaattcccctgctctcatacaggcttgaggagggctaaggaaagtcacagttgaatgcatgctccctccacacccatgtgcctgatgcacacagcctggcccttgtgggcactggagggcaccctacagtcacagaggcaaacgaagaatgtagagctccagctggatgagggccgtggggaaggggcacagccctgggcaagggtgtgcagagtctgcatgggatttgactgagcaatctggaaggcttcctggaggaggagctattgctcagggtgaaatagaggtcttgaaattagtacaacacatgccccatactggggaatttgggggtccctgggggaaggactctgttaccaaaagcacacagcacaggttgggagagcaactatctcaaggcttttatttgctgtttcatgaaactgaaaatttaagtttttaatatcacatattatttcatgaagagtggcttcggactttggggtagggtctggtaggatcccagggccccttcccttggcatcatcattgtttcccctccatgttcaagttcagcatctctgcaccccttgcctggcaaaccccatcttcctgtccaaagccagacttggctccctttgctccagtgagtggccgttggctgggaggctgggtctgtgctgtgtggggggtgtttggtgtcctaggaggagtctctgtcctgagcagagacagaggaaggcagggcagcctgctcagaggatgagcccagctattctgggaagcaggcaggaagtggcagctccaggtccgggtgtgagggcagtagtgcaggtcgtggtcccagatggccacggaggtgtcagcgtttcactcccagcacgtcacgccacgtccctttcctctgctttgttcctcctcagctgtgaactgtctgggactgggccaggagacagtcctgggatagggaaagaaaagaggggcttccgggggtggggagcggggctgggcggctgctggctgagccaagtggactgggaggtgtggacagggaaccctggcggggccggccaatggtggcgtgatgcagcctggcttgggaaatgcccatggaggtgacaagtgacagccgggaacagacccactgccagggctgcctctctctttagatatgtcctggcatctgactttggtttcctggtgtttaaaggctaattgggatcggtcgtggtgcctcaggcctgtcaatccagtacactgggaggccaaagtgggaggattgcttgagcctaggagttcgagaccagcctgggcaacatagcaagaccccatctctaaaaaaaaaaattaaaatattaatactagctgggtgtgctggcacatacctgtggtcccaactactcgggaggctgaggtaggagcatcacttgagcccaggagttcaaggttgcagcaagctatgatcttgccactgcactccagcctgagtgacagaacgagaccctgtgtctaaaaaaaaaaaatttttaaataaataaataaaggtttgttggacatgttagctcacgcctgcaatctcagcatttggggaggctgaggcaagtggattgcttgaggccaggagtttgagaccagcctgacctgcctgggcaacatggtgaaaccccgtctctactaaaaatacaaaaattagctgggtgtggtggctcacatctgtagtcccagctaccctggaggctgaggtgggaggatcacttgagcccaggagtagaggttgcagtgagctcagattgtgccactgcactccagtctgggtgtcagaaccaggccctttctcaaaggaacaaacaaggctaacatgttgggctttctctgcttctgggcaatgtccgtgaaattgaagccgcactggtgttgttccacccttccttccagctggtctctgaggcccaggccagatgcttctctggttagcagcagattctaggccagagcctgcctccaggtcctgggaaggctggcacgctcagatgcactcctgggcgtggccttcctccgatcacagtgtgagcgaatctccctgcccatcactctgctcccctggcccagaccaggccatgcctcagggcttctgcacgtgcagttttctctgcctgcagggtctgtccctagctctctacccgattcagatcccacaccagctcctggggcagccctcttgccctgcctctccccgagacgtcaccctttctcttttccccattggtggtggttttatgtgttcatttacggtttattttctctctccctgtgtctgttatctgtctctgcacccctggagcccagcgtggtgccaggcacacactacgtgcctcctgggttgggggcagcagggacaaaagccaggcatgggatgtggctcttgtgggatgcaccttgggtgtgactgtcacggaaaaggaggagacgtggggtggggaagggggcagcccctactgttcctggcagcagggccagaattgagagccagaggttgccactggagggcttcctggggaggcagctggcaccgcctgattcctgtttctgaatgccctctcactctcccccacccccatggaaccagaaccacctcgtcaggcccagcagcccttcagggtcagtctctgcatgggtggtaatatggcttacctgagtcctggtcagtctgtggcctgggagtccaccctccatgactagtggtttgtggcaggtgacgggtgagtggtctccatgctcccagccgctgtgtagaggtgccaacctgcccctcctgccagagctgggctcctgttgggcgggactgaggataccgagacagaaataaaactgctaaatgcatctgttgttgaataattcaatgccccatgccaggcctgttgcaaaattagccacttcctccctccaggcccatgagtgactcctggatttggtgaaagccaggcctagtggaattgtggcccggaaggttctctgggagctgggaacctccatgcaggagcccaggggagggggtgcttggccacatgcgggcccctcaatctgccctgtggagcccggcctggcctgcagccccctgtgcagggaaaaacccgcggttttccctggtggagggcacaggtcagagcgggcatggacagggcatgaggaagcagtgcagaggaagcgtgagcatttgtctcgggccagctggagaaaggaaatggggctgcttcctggagggcagagacatcaggggctgcgctgtcgggctcggcgtgcaagatttgtgtctcatcccagggttaggtgcctcccaaatgccagggcttcccatgggccatacacactcagtcgaacaagatttgcacaaaacctgggccataagctcgctgagcacttggcctgcccagccggtgacaatgagaaccgcacatgctcagccttccctggactcagggccctacgggtgctggagccggggcgggagagggccgcaggctgcccctgcctctgcatcctccccgtcgatgcctggggccactgggattggcagaaaagggatgcccccgagatgggcagccaggagaactgtctgtctcctatcccaatatgcctacctccctctctgaatccccatttccccctcatccttgcccccacacacccagatttgcaatgggacacacggccacctgggatgacaacccctcccagtcttccctcaagacaagtgtggccatgaccgcatggggccagcagggtgtgagttgaagtgtcccgcagtggcttccggggatgtgcagccctgccctgaggccctctggccgcctcttgctctctgagcagggatgtccgtgccttgggcctgaggctgagctgggctaggtccctgggtgtctggggccacactctctggtccagcctgctgttacaggggatgcctcagggccaccactggtcatggaggctgggggcgcctgcctgtctgcccgcctggagttcaggtaaacaaccccactgaggaggcacccctagccgtgggagttggcgtgtcctgctccccagggcggtctgtccccttggcgagatccttgctgtgtcagcagagggttttcctggcccagggtcttggggagcagatgatggggctttaggagctctggctctgggaaggcagtggaccctggagcagggatcttgggaggatggagagttggcggctcaggaaggaggctgctcaagccccggcctgctcactgggaagagcggtccttggaggagagagctcccgaggagaaagccatgatgctgtgctgcgctctgggccaccaggtcttgtctggggggaatcctgaccctgtgtgatgtgagtgcagggactcccccaccctccgaccaggacctttgtactctcctggccgtgtcattgcacaactccaggggccgtcactcacctgagccctctttgctcttcttggctgttccctgatatggccacgcagagactatctctaagtgtcagttctggactcagctggaaaggtttcatgacctcaagggacccatgggacttgagggtggggcagctgtttgccctgtggatcaaaggggagtgtctgggatgggatccacctgccctgccctcaaagtgctgggcagtccctcagagccatagagcctagggggtcttgggccctcttccccagggcatggcccaggcacctgctggcctgaggtccctgctgggcccaaggcatccctgccgtgttcagagttccacaggcaccagtccaccatgctggggcctactgggagagacagccacccgcctgctgtcgggagcctccatcaccagagcctgggggtgtcccagccaccctggccgctgtttctctgcctccgcaccggcctctctcctgagttccatccatccctgcaggttgggttctcctctctcctctgggatctgcacaggttgccattctctctgcctagactgggcctccacctctgagaagccctcccttattgccccttccagtgggctgggagagggaggaaggccaggtgcagaaagagaattcacctgcccggctaaagccccacctgcctatttcaaggcctctgatgccccccggcctgcaaggtgtgtgcatggggcctgtcccatgctggctcacccagctgctcagagaggcaagtggctcccgggccccacagtgacactgggggactctttgtctccatttggggggtgtgcaggtcactcctggtgccctggtcagcttccccaacctgagctgccctcagctcctggcttggccctccacggagtgggagatgcccccctcccctgccattatcgtaccttacctcgctggcggccatggaggcagtgagaagagccgagggagctggccggggcgcatttccgtgcaggacactggctgcctcccagctcactcttagcctggtcatagagcccggcagcatcttgccaggtgcctgtggtcccagatcctggggctgccccatctctggaatattgaggtgtggctggggctgatctgaggatgaatgtggctcaggttgccgggtgcccttgacgcattcccatgtcccagtggggaaaccaaggctcaaggaggccacacagcagctccatttccagggacacccagtgttctctgtagtgggtaggaggtttccctatacaggagaccaagctacagcaagaaagacttggccgggcgaggtggctcatgggcgcggtggctcacgcctgtaatcccagcactttgggaggccaaggggatcacgaggtcaggagatcaaggccatcctggctaacactgtgaaaccccatctctactaaaaatacaaaaaattagcccggcgtggtggcgggcgcctgtagtcccagctactcgggaggctgaggcaggagaatggcatgaacccgggaggcagagcttgcagtgagccgagattgcgccactgcactccagcctgggcgacagagccagactccgtctcgaaaagagacttgggctagatgtgaggagggactttcccaagtagggatgaaccctgaggacccacaccctgagccgccagtgggtcgtgttgacctggcagctccagggcacctgaggccttcgctgtccttccgcacctcgcccccttcccgagtggaggtgctctgggagctctgcctgcttcctcaagtctttcttgtttttttatgttattttattttagatttgaggagtacacatacttgtctgttacgtgcgtaatggtggggtttgggcttctcgtgcgcccatcagccggatattggacgttatactcaataggtaatttttcaaccctccccctctcaccctctccacctcccctttggagtcccagagtgacctttctccgtctttctgtccaagcatcccatctgtctagcttccactcatgagtgagaacgtgccgtgtttggttttctgtttccggtagttcacttaggatcatggtctccagatccatccgtgttgctgcaaaggacatgatttcattcacttcttggaggctttaacgcctgccctgtgtgagggagggcggagcccctggcccaggggcggggaggcctgtccacccctcccacccgtccccgaggcccctgctgcccagcaagaccaccaccctctgctccaggacagcgcagccgccatcagtgggggtgaggggacaaggctgctgggaccaggcctcgcccaggcagagcctcgccatttctggggtggggggtgcacaggtgcatctggtctgcccagcccctcctcaccctaggcaggcctctcacagagacaagacgagtgtcctagggcagatagggccacatccatggggtcacttcagtttgtcctcccggcgccttctaaatatactctctgtgggtgtcttatcacagcccagggagccaggcttggtgtggccggccctgggagcacagagccccgttcccagcagccctcggccctggggggcttgtgctctgccgggccacctgcaccctccgggccccaggagaagctcatgcctttcctgcttgcaccccagagcctggccacccctgtcctctgctgaggccctgaccacctctatgtgtgccatggctgcagtgacagcccagaccccaggggccgggcatcccacagctctcctcactgagcccctgggcctatccgcccacgcccaggccagggctcctgctggaatctccctgtggaaggccaggctgcctggatgcccaccactccaggcttacttctgggttgtagttttcggggtgcttcgaggtgctgtggggacctgtgatgctgtcagggagacccggagtccagttctcgccaaccgctcgatgctgtgtgacttgaggcaggtcccttaacctctctgagcttcctcctctcctgtgaacaaaggatgggtccacttctcaggcttctcatgaagtttagaggcgacaggaggaggtgggctttaaatggctcagtcccagcgtcccctcatgcctgggaccgctgacccaccgggattcttgggggccaccatagagcctgtttttaaaggggatgtggcggccagctctgggggcacacgttcctgtttgaattctcaatctccgggctcaaaattggcccccagaaagcctttgagatggacagggagctggaccttcccaattcggttgcccttgcttgatgtttacatgccactgttgggtgctcctgattgtgtagcgggtcccctgaaaccaacacacaggtgcagacacccacatgccatcctgccagagccctgggttctcagcaggactctttgccgggatcctcatgctacggccaccacctgattttgtcgataaagttttattaggacacagccatgcccggccgaatattgccacagaggccacctgccccaccacgcctaggacatttcctctctggcccagaggtgtgccagggctgcactgggctcttctggtggggagggacattgttctggcccctcctgatctctcccccaccttgccacgaccccccagagtttgcctggtgtcaccgggaagcttcctggctgcccgagggtcccccagcacctgtccctctagggcctctgaagggctttgacgtgacactcgggatggcatggcagggccctcaagcacggctgtgttcaccccccaggctgctcctggaaaggagggatcagggcccaggctccacgctccgcactgaggtgtggtcgagggccctgggcgtccgggtgagatgggaatgagcccttggtaggtgccaggcggggccagccctcatccccactgcaaggcctgagcgtccaggagccccgtgcgcagctggacccatcagtccccaccctgcagggccgttgaagagggaatgcacacctgtcacctcttggtgcgggggcatccaggttcctggcgatggggatggggtgagatgcacctgatggacctccaggtgggaagctcctgggacaccctggagggctctggtgggagacatggcattctgtctgcaccgaagggggctcagggctgagaagccctgggacgggttggatttggggcgcgttccccagggccccacgcgtgttgagtccccgctgcgtcactgtctggcctgtggcgcctcacctctctgtctggcaggactcaggcagaatggaagtaaaggcaggaccttgtcccaggacatccaggcatgtggcgtggcaaccaggtgggatggcagggtttccccctggcaggatccccacctcctgcacctgtcctgacttggtcttctggggcagcccctaagacgcttcttcagggaagagggaccggtttggccagtgggaccatggccctgggagcatatgcctgcacgtcctgcccgctcacacctgcctgctgggggggccatgcctgcgcccgcagctcacgtcagagcccaccccaggaggctcccagcgatctgtcaacctgtgctgttggcatgcagcctgggggtgaggggtggcggaacgctgcctcagtaccacgtcctgctcaaaggccacttgcgagctaggctgagcctgtggtgtgcggtgggataggaaggaaaagaacagagtctaaggagcctaactcacttccagattcacccggaggcctgcatggaggaggcggcactgagacttcattcaccgagcttgagggtttaccctaacattcattcacaccatcagtcattcagcaaacacttcacaaacgtgcatcccacgcctggcactgggccttcggagggagggaatgcagctggtgggcccctgcctggggagcccctgctctggtcggggaggcagtggtggcagtggctgcctggcggtccatgaactggtgcaagccagagccggaggcctcctgagagcctggcagggaagcccaggccagggcctccgcagaaggagggtttggggtccaggcttcatgtggggggtcttgtaacatgggagggtagacgctgccttgggacaggagagacagaggcggggggaccaggggagtgggctgcagttggggtgcaggcctggtggccccggcagggggaccagcctctggggaggtgctgcaggcacaggagttctgtgtggacccagccgaaagctggcaggaagggacctgtttcttggggttcccagtccagatctgtgttggaaaaagtgtcagctgaaaccccaagaggctggggacagccttggtcctgctgtgggacacaggtttaatctccagatggctcctggataggcgggctggcggctctgtctaacggggacagcacacttggggcttcgggagacaatgagggcagaaatcttacccaccggccacaccaagtcacccattgttgtgtcccttgggctgggatcccatggctttcaagaactttttaaagaaatgagactcagctgccgcggaacaagccacaggtaaagagtataagacagcgtgaggcatggggtggccacgggagccctgggccaaggaggcccagtctggtggggaggcgtccattcacccggagctggacggggaggaccaggctgtgggtctgtgaagcgggtgtgggatcacatccacgctccttctgtggtttgtgccctgttgtggctgccaggggaggggcttccaaggccctgccaaccagctgggcagtgtggacaatggcagacagggtgctgtgtgggggcctgaggggcaatggttggggggcagctgttgccgttctggtgagaagtggcggtccctgaagggctggggtgctagggagcctcatggacctactcccgacgtggcagctgcctgctgcagatgggccagccatgtcccgcctgtgccgggaatcaccacccccagctcccttctctccaacatgacagggttcgggtgatgccctgtgggctgaatggtgagagaggcgtccctgtgctgacaccagtgggcgtggacgtgaccctctttttaaaagaattttttcagatgcaattccattaaggatctggaggtgagaggatgaaaaggaaactctgagctttgagtacatttttaattatgttttaaaaattaagacatgaggccgggcatggtggcttacgcctgtaatcccagcactttgggagactgagttgggaggatcgcttgagcccaggaaatcgaggctgcagtgagccaggatcataccactgtcctccagcctgggtgacagaacaagactctgtctcaaaaacaaaacaaaacaaaacaaaaaaccaaaaaacaacaacaactaatatatgtttttgaccaatacctaattctgttgtttaagaattcaaaatctaccaatagtgatcataagtaatgtattaaatacttacatagtacagcaggtgttggcccccccccacaacattggtttccatccctggaagctgcaaatgtgacctgacatagaaaacacccctttgcagctgaggctgagggtcccgagaggcgtgattgcattatccagggggcccaagtccagtgacacgtgtcctcctaaaagacaggacagattcaacaaaggaggatccggccacatgctgcacagcacgggagtgatgccgccacccacccaggacgcgggagcccgcagaggctggaaggctgaaaagggccctgtcgcccccaccccccaggatgacgtatggcctgatgtggcattcctgcctcaggaccatggcaccaagtggtggcgctggggcccctggagtcggccagtctgggcacgtcccatgctgtgtctgagcctcagtgtccccatcgattggtagtgcctcctgaaccccaatccagggggcttctggggggcagcctgggaccagacgtgcctcaccagggcttctgtctcctcaccaggacttccatgatgtgacaccttccacatggggttcagagcggggaacctgtgcctagtgtccagcccagcgtggggccctcggtgtgggccagggctcacccctttgggaggggtcgggagatgcctggcccaggctccatccatgcagagccaggaagcaggtgaacctgtggggaccttggcgacctccaaaccctgctgaggctgcctgctgacagccactggtgaggggggtgacagccactggtgaggggggtgaccagctggtagctttttctgaggtgcagattcagccctggggaacagccctggcaggctgtgagacctctgcccctgggcgtccacatcccagggctctgagctcagcagccctggagccggcagccacatcagggatggagggagacctgctggtgaccagtgagtgagcaggggaagcctgtcctctccagcgcccagtgtttccttcctggggcacatgggatttggaggcatttggagtctcccaggatgacttttttttttaagcccctagaagtggtttggggtttaagcgtcaatatttaatctcttgaagttacacattcaaggccctatcctgccttcggctttaggttcgcttcacaaacccattgtctgcttatcagcctggcgaggtcccgtccccagtaggggtctttgaacattgctcgatctcattcaccagccacggggaacattttgaaccctctgatgcttgctctatgaatgttgtttgctttaaaaaaagttttttttttattgtgataaaatacacataacacacaatttaccgtcttaactctgtgtcaggtcacggcccagtggcaataggtacatttacatggttgtgcaaccgtcaccaccatccaccccaaaacttctctcccaaactgaaattctgcacccatgaaatcccactccctctccccggccccgccatcctgctctccgcaaccgtggatccgtcctccccatgtccacagatcccctctccctcggccccgctgtccgcttccctgcgacggtggatttcgctgctctgggcctttgcgcttctgtgactggcactgtgtgttatccggtgtcctcaaggtgcctctctgctcatgtccttccatgcatgatgctttcagactgacaaaactcttcaagtattaacgtaatttttaatgtttacagattcaagaaattaagcatacggtcacgagagtgcaaagttctgtgaaacgctccagtggttacacgccccggggtttcagcttcgaccctgggtgagttccatggtgcagtggcttccagctggagttctaagggcaccccttgagctgcccacgtgtctttgcacgtgaagtaggtggctctctttaaggttcctcaactttattgggaaacatctcagggttacaaaacgccccccatgggctaaagaggctgtcactcactgtgtgtggggcctgtccccgagtgggcatggaaggccagagtcccggcacagcccccacccggactggatttgcttggcgggtcacctggatcaaccaggcccatttaggagcaccactcaggggccctagtgtgtgcggcagggcaggtcatggagtctccagccttcagctcgcgttagccccaggccatctgagccgtggagcccacccaggcccgctgcctgcaccccgggggagccctcccacagcgtctcgggctatgaccctggcagggttcctgcattctcctgtgttcccgggcacccggggctgagatgttgaaatgatgtcggataattcaccgggtgccttcggggctggtactcgccgtcactgctcctgaggcctatttgctgtcaaggggaacaagtaggaggttgttttctggggtgcggtgggctccccgctcatgcagctccccgccccccgcatgaccacgccctcttgggagctcgggtgggacagcattcaggggaccacatgagctgggggggggtcggtgtcttctctcccccaccccttcgctagcctgtcctgcttcccactccgagtccaaaacacgcataggattcgtcctctcccagggccttagtttcccggctctgcagagtggggggctgtgactgcctggccttggagctgaggcagagggggtggtaggtggccctgcagaggcaggaggggacacaggcaccccaggccctgagtgcctcaagggcagggaccccagctcggcacctgtgaggttcccagctccgcccgagacaagaatagataaagcggtaaataagataaaactctttttatctggagtagataaaagtaagctttgtcatataattccttctgaggctagcacggtatatcaaaatatcggaagaatcatttagccttcagaatatggcaaggctgacagccagcctggcccatgggcacctgtccccaccatctgcctggcctgcgggggaacgttcctcagcccctgctggctcccaacccccgggcctggagccctgtcttctgcctcagccgcgattccactgcacgggactttcccaggcacctctgcccaggtagttggggtggacgcccacttgggtgcacactctgtgggggctggtccaggaccacccatgtgcagtcttccctggccacatcctgtattctcccgcaacgcccagtcaagaatcttcctgctgcagtaactccacatatctgagccagctgtgtctcctgagcacaggacatgggcaggagaggcccctgcagctggaatccgcgccatgaagcccaggcgcgtggtatttgcagccagtcaccaagttttcaagccctcacctgcggcctgtgagtgcccaccctgcacatggtgctaaccagcatccatcactgctttcttttttaatttaatttaatttttttttttttgtggtggagtcttgctctgtcacccaggctggagtgcagtggcgcgatctcggctcactgcaacctccacctccctggttcaagcaatccccctgcctcaatctcctgagtggctgggattacaggagcacaccaccacccacgcccagttaattttttcatatttttagtagagacggggtttcaccatgttggccagactggtctcgaactcctgtcctcaggcaatcctcccgcctcggcctcccaaagtgctgggattgcaggtgtgagccgccgcgcccggccccaccactgctttctatgctgtggccgaggtcaccaactgccactgtgatggacggctgtcacccaaacagcacgagaatcgaaaagccgtgatggcagatgcagaaggcagcgtcgcctgtggtcttttagaagggcagctgtgaagtggggttatctcagcttccacattgcatcacggtgcccctgtgaagggcagaggagctgcaggtaattctgttcgctcgcctctgccttggaggaagtttacagttttttttttttttttttttgaaagtttaaagctttcaacctgggcctggaggctgcagggtcagcagacctgggtcctgcccatggcccccttccctcctcaggcctccatttgctcatctgagagtggggggagtgcagcgccttccgtgcaggtcactgagaggctggggcagtggcgtggattcgggtgcatgactcgcagacatggctgtcgcttggctgaacggtggcccctgaggtgtctgtgtccttgtcctgtgaacaagttaggttgtgtggccaaaggggctttgcagggtgactgagggatggctcgtgagaggggaggttgtcctgggttacccgggtgagccctcactgtgattgtgaggattcttctaagagaagcaggaggatctgagttggaggaagagacgggaggatggaagccaggctcggcgacgggaaagctgctgtgccaccctcaccgcagccctatccctgctcacgtgcaccaagaccagagcctggcaagtcgtctcataccgagggtcaaaggggcccagggcccagcctccagggaccccagccatgccgggtcagggaaccaggctgcagtcctgtgtctcctcctcagtttaccccaattgtgacctcagaagcccttggagcctcagtttccctacttgtagcatgtgtttgatgatagtgtggcagtgatgtcacagtctggcagggtctcgtgggggtctgtgttactgtctgcaaagcactggctgggccagtggtcagtgagcaggggcgtgggtagcgggcagtggcctgcagtccccaggagcacttcctgttgctgaacagacagcaacttagtggatccttcccagggcccctggtgggtggtgggttttgccacatctttgcagtagacagcactggcagcttccggcttatccaaggcctcagggtgaagtcgacgctcgctgctgattccctgctggacgtcaggtgacacttccctccacagcctgggaagaagcacctgtgggccacttctttgtgttgataaggaaactgaggcaggggagctgcctgggtcaccagtgggcactgcatctccatgtgcagatggtgccctggccctctctgcacgccgtgggcctggggagcaggcaggtggcatcttctgccccgggcagcccggctctgcttcctcgtggctgagccaggctgtgtctaatctcacttccctgctcactgcaaatcaaaacaaacagacgtccaggaggattaagtgtggcagtcatggcggagggagccctggtagggtggagagagccaacagttgcaccagcaaggggcagagacccagcccagccctgggggctgcagggtgtggggacagggcctgcagcttggcacaaagactcttctaagaacctggagggaaccctgctccggcagtgggcagcatgctgtgtgcaaggtgagccagtctgagcccattcccagtgcccggaatggtgcccagtgcagatgggcactcacccttccaaccaacctttgcttgtgtccccgtgagatccacagattcaccctacggagggctccccacagggttggcccggaggctccagctgtgtctgttgaacaaattactctgcatccaccgcgtgctagcgctgtgcggattatagtcccagagacagatgagagcaggggtggtcagtgtaggagcacccagagggagcctggcagggcctggacatcctgtccaagctggccaggaggagtcctcagagccaaagcagtgtggagggtgggggtgcagagagcgtccctggctggaagcaccgcgtttgcaaatgccaggcagcttatgcagccagcgctttgggcaggcgggagtcagggggactgaggcccaaggaggggtagggctgcatgccagccttccaggtgctcctgggaaccacgtggctgatcagacttgtgctttgggtcgaatgtcccagtgggggagtaacctcagggagcagaggaagggtcatggtggtggggatgaagcagcagcattggggcttagagattaaatgaaggaagtcccacggggctgatcacctactgtgcaccaggctgcgtcccgggcatggactgcagcccacagccccactcttggggtgctcatggtctagggggtggacaacagactctggtcccagcgatgatgcttgagtataaaggacacagttggggtgttgtgggggccagggtcagacatcagagctggcctctgcctatgagacagggcccgctggcaggaccctcaagctgggcttttaggctgggcagcagcaggtgcacgggccctgaggtgggccgggctgggcacagtcaggactggcaacaagggccgggaggagctggggtgatctggggccatcgtggtgtaaatactggggcacgacatggagggttcactgactggctgggtgtgtgggctgggggcgccgagggtggaggtgggcactgtggtcagggggagatgaggatggatgggcagggtgcagacaggggctggctgggttcggctctgcaggtagagctgaccggtgtggcagggacagggtgtcggtgaggcaggtggctgaggaaatggtagctgcaggttttggccccagtcccagcagcgggactatggctgtggggagggaggaacccagggagggggcctgagcagggtctttggctgagtgagccctcaagggcctttgggtagggctaccagaggccaggaaaggattgtcctgtccacaggagcttggggaagggggtggggggccagagccccaccttccccagaaacctccgtgcagcaggaggatgagccgaggcaggctgtgctgggaggtagcctgtttgttgtgggctctgggggcctggggagggtgggctgggctgtccacatctggacaggtggaagaggatgggttctgggtggggctgacttcaggaggctggatgagaggcaatgcagggggccttctggctgtcctggggtgggttagaagccactcaggatggcaggatctcagggagcggagggagcctggggcaccctatgccaggcagaggatctatgccggggcccccagggtctgtgtgtggctttctctgtttgtgtctcccctggccctgggggccatgtggccatctcctggctctccggtcgctgaggatccacgggggtccctggagtctccggagcccgtgggaatccccctagaggcgggaggaaggccgggcgggccctggagggtacgtttgcagtggcagcagctccctatctttatggttccggcgatcagagaaggcggcccgtcttttctctgcgggcccacaggcccagaacgttggccccagggtggggctctgtgcgccttccctttcatgagttctgtggctcggcctcggggccttggaaaggaggaagtgaaactggaggagagcggcccacagcctgccgcctggaggctcctctgggaagcagacgcttggtgcaggtgtcaggacccccacctggcgggctggcttctgtgctgtgaccaccaacacccctgccctgggccctgaactcctggacagggggcgttgactgctctctggaagtgatttgtaaaatcagctttgtagagacgtaattacacactgcagttcatttgtggctctagggccctaagtggctctagaatgttcagagttgtgtagccaccaccaccatccacatccagaacgtttaattaccccaaaagaaaaccccacgcccacagcagtcccgccctggggcagccaccagcctgctttctgtttctgtggctctggctgtccagggcgtagccacactgcaggtggtcagcaggtggtcacctgtctgtgtctggccttggcgccatgtttctcggacccatccacgtggcagcatgtgttggtgcttcgtcccttcccgtggcgggacggcatccctcgtgcggacctacctctagtgtgtgcttaccagctaatggatgactgggttttcgaagcactgtctgttcctacctgggggcggggctgaggccaggggcccctccactccccaggtgcatctgtgggatgggcagaggccgtgatgctgactgccgtgtccctgtcttgcagcttcctcatcgtcctggtctgcctcatcttcagcgtgctgtccaccatcgagcagtatgccgccctggccacggggactctcttctggatggtacgtagcatctgagggcatggctggatgtcatggctgccttggaagctggcatctccctggcgctgggccccataaggtggggggcagagccactcccagccccttgcccacacattggtcctgccctgatacagggggcacctccccagcccccacacttgccaagtgacttgggatgtatgtgccacaggcgagggggaccaaggactgaggggaacctggagctggtggtctgaaagggcttcctggaggaggggcttccaggctgggctggaaggaaggaaggaggaggtagggtagagctggtgtggccagcaaaggcctgcccgagccttcgtgtccctggggtctgggtgactctgttcctgggttatggctggcacacaggccctgctggtgtcccagcagcagcccccaccccaggcacctggatggtcccttccattggcctgagcggtgtctgtgccatttctgccaggcaggtgctgagagcagggcagggcaggctcatagcctggtgggaaaccccaaagttgatctggccgtgaggctgcctggaaggtggggtgcagggggccagctgtgtctggagcccacggggtccccacggaagccacctgaatgtgggccgtgagcagcaggactctggcaggactgggtctagcacctctccgtggccaggcttttgtgttttcctgtcttgtcgtggaatagttctagtatctacaaaggaagagagtgtcacgactcagctcccggcatgcacaggcagatctgggctggtttcatgctgctttctggcactgtgtcttcctggccaggggagcccgtccctccggggtccagagtcctctcgcgatggcctcggcagtggtatccgtctcatttctagggagtccgttttacctttcctttgttgcttctggaccttgagccatagctggaagaactcacctgtggtttcctccagccctgaccaggttaactgtgtgtgctccatggtggctgggagtttcctgggtaagtggtgtgaggcacaggcctgctgtcactcttccctcgtcttcccagttctcccagcactatgttttccacagtccatctgtcctgcctgactggaggggccgtcttctctgtaaaccagacgtccagaggcagtaggaagggtctgctttggggtttttctattctgtcccactggtctcctggacttttcctttaccagggccctactgacttggtggtcccggtactaaaatcaatttcatgatgtcactttgtgcctcggcagggctttctttttcgggggtttcctggtggcgcttgcagccttgcttttcccagtgaacgttgccatcaccttatccagccccgggaagaaactcgaaggccgcgggtgaataaactgggggagactgacatctcggtggtctccaggagcatggtgtgtgtgtttatgggcagcattttatggtttcattatgtagattgcaggcagtttaagtctattcctcatcataataatattgagagaataagttgttattgttgccatcacatagggagtttctagtctatcatgttttccaggcactttcctggcgtctgcgaaagctgttaatttctgctacagcctgtggtcctgctacttctcgtgactgtggtcgtagaagtttttccctctgtcctttgcatcttttgcgtttccagataagggatgccttccaggagggcagattgctgcttgggtctgtccagagctgggggtggtacctgcggccagcggggccctcctggcttctgtgggcgggccggctgccaggcggggggtgcgcacctcccgtgctcaggaagggtccttcaggtccgatgcctggcgtggttttacggtgaccatgtggattctggtcaggggtctttcctgcttctgtgaggtgctcctgtcagtgaggggccccccttgccttcctggaataaacccccttggtcctggcgtgtgagtttcatgtcctatcacattgtactctcatgctttgttcagacttttgcactgccctgtgaagtggggtgtgtgtgtcatcttgtggtgccatcttggttggggtgaggccgtccttcccccacagggcgatgtccaatacccttggcagcatgggcctcatgttttatggggtccccaaggtacctgcccaggatccccaagtcctcctcacccaccacagacctggctctcagatgagcacccagccaagtctctggccatgtctagcaggaggatgttctgccccggccaactgacagggttggctcaactgcaggagtgggcacggcatgtcctttgctggttctgccatggggcgggtctgtggggggtccctgacctggtagttgtccctggagggcctggggccaaggatgccagtggttcccaggctgtgagagccgcgctgccaaacattcccctggagagtctccgtgtgaggccctttgtacctctgcaggtgtgtgtacatgtgtgtatgtgagtgcccacatgcacgggaatgtgtacacgcatgtgcgtgtttatgggtgagctgtgtgcttaagtgtgcatctgtatctgagtattatgtaagtgtgcatacacatgagcacgtggggactttcacgcatgtttggctctgtttcaatgtgtgtacatgtgtgcacatgtgtatctgagcgtgtacatgtgtgaatgtggccacatataggcacattgtagtgtgcgcctgtgagcatgtattgtatgtttatgcatggctgtgttgtgtgtatttatgtatagctatgtgtcgctgcgtgtgtgtacctatgtgtatgtacgtgtgttcatgcctgtgctgtgtgtgagacgtgagatcctgcctgtcccatccctcacgtactaacctggatctaggtggttagcccctcgcccccaggtggcctgggacttgcctggttttaaatggagccccggtgctaacgtgagcccacccaggtgctcctgcccagccagggctgtctgtcagcaccacagcgtccaagttcaggtcctcacttcctaggtggttatctcccaggcagctgggagggcgaagcctggagaagcctgcacccaggctggacctgcagggaccttcagacgtgccctgggctccacatgcccgtctgcagctcgagaattagacgtgccctgggctccacatgcccgtctgcagctcgagaattagacgtgccctgggctccacatgcccgtctgcagctcgagaattagacgtgccctgggcttcatgtgcccgtctgcagccctagaatcaccagcagcaccccaaggcccccatgcggcatctaaaccaggcaggggacaggggcatggagcagaccaggtagggttgctccctaggatgcagccctgcccaggcaggagggcagaccctacacagtgctgagctgtgcccccagggaagcctccaagatggtcctcatcccagcagccctgcccactgtctgcgcatccctggggtctgtgcgccacctggtggctatttgctgaactgtggccacaaacccctggtcagcaggaaccggccctttcactgccctgcagctccctctcctccggggtggcatggcagagaagcagcccgtggccccaagcatagagccccctttctgctgtagtcccccttgcagtcccctctgccttttccactgcttggaaggcagagagaccctggccgcctcccttgtccctttatctgtcatgccagctgcctccctgccacaccttgcgtctcaccaggcaaccctgcaaacagcagctggggaggactttctaagacaaaaacctgatcattccagaagctccctgtgacgtttaggctacattccccaaggtggtgccacgttcaggcccatcacctgtaacactacccaccccacctcacccagcctgggctcactcactccaggccaagccttggacattcctggctgccccagggcctttgcaagccctcttctctggacctggctgtcctcgggagtgtcagcactcagcctcttgtcaggtttcaggcctctgcttggcactatcctgcacaccatccccgccgacctgccctgttctgggttcatggggctctgggaggctcacaagcatctgtctgcctcaggccattccacactccctgagggtgggaccccgtggctgcgctaaccccacaagctctgcatggcgcttcctggccgtgcatgtccctccctgcatcaaatgcataggccagagttgcccagcgaggatgacccagcttggtatgtgctcccggcttcagctgcccctgcgtgatggagacaccctcccactcgccttgccacacttcccagcagtctctcgaagcactggccgcgtggaaacaaatccttcaaggggatttgagggtccagctgtcactcagtcatggccatggtgggggcacgttggggacacagcagagagtgaggcagccgtgggcctggccttgacaggcggatgtacagacacatcagggccgagactgaggcgtgggctctgggtggggagacagtgaccacttgcttggaggagggggcgctcaggtgggaggggcacagtgagaaggaggtaagctggtgctggcggggcaggcagggacccctcccagggctcacagcttccagcggacagcaggcacagggctgtggggatcagagcacaggcagaagtcacctgacagcaggttcccgaggcttcaggcctggaggagtgaggacggctgttgggttcttgattccagcagagggaggctgtgcagggttgcaggaaggacggttgggggcgcttcggggaggtacgagaagcaaaggtgtttgcagcccttggggccaggcggcgggaaggcctgtagacgccagagggcgctcgtgctacatgcaactcaggagctgctggcacccgccaaggagtgctgagcgcggggagcccaaaccacagccttggggaacccaggaggggccgggcgggtgcaggacccgcatgagggattccgagagcacgatgtttaaatgttgggggaaaaaatggatcaaagcgatgtgttcccagggagcccctgttttctcgtttcttttcgtacgcccagctttgcagtgccagaaagctgttatctcagcactgctaaggaaaccccagcgcggcctcggagggattaggcattctgctgaaccagggatatgcggtgggcctgaaaaagccatttcgggaggaatctggtctcggctggggtccggccggcaccgtgaacaccacgtgaacaccacgtcggaaatctgctgggcagggagatttcctcaaggcctcccagggaggagagccacttcctgggctgcaaagagggccccaacctggcttctgaattcagagggggctgtgtgtgcacgtgtgtacgtacgtgcatgtgcacgtctgtgtacccatgtctgtggaagtggcacacgtgtgcatgtgtgcactcagtgtacgtgtgcgtgcctgtgggtagctccgtgcgcacatgcgtacacatatgcctggtgtgtgtgtgcacacgtgtgtctgacgtgtgtgtgctttgcgtgttcttgcctgggaaggagttcccggtttgggtggctctcctgtttcttgccgaagccagctgctgctagaaactggccccctgctctctgcagtaagagaccctgccctggcccaggtgagggcctggcttttgtctccaggatcacagcttttgtcaaactccacacaaagagagaggcactcaaaagcacaacacaaacacggctagtccgcgcctttggtggtgaacataccagggaattgtcctgcaatgcctgtggttaaaaaaccccgtgagctgcggccccggaggcctaggggatgaggtcatcgctgcggcttcctcccctctgctgaggctccctccgccccgcccggtggcccacccctcccgccagctgcagcctccactgcctgggtttctgctgcgccttcagcacacagcgaggcctcagtttccctcccagctcagagcaaggcctcagtttccctcccagcagcaaagtgagaccctgtagggagtctctgggcctccgtgacggccctgggcggccctctctgtggaacaaggtcgggtcctgtcctcagcgccctggcctccacttgctcagggcgcccgcaggcccgcaggtcctcacctggtgtttttcacctgggacccgcagctgctctgatgaggagcctgctctgcgcacggcctggggcggtttcccgcagcaccatttctgccgctgccgggaaaagacgcagagcaaaggcacctttgcccaggttggggaaccagtgggtgactcaggattttcctccacccaccccgaggtctgactccctctgcagctgccgcccgctgagggttgtcttcctccctgcctgcctcgccctgcctggtgagctcctatgggtctgacgaagccccgtcctgcacacttgcttcgggggcaactccccactagactggttgcccagggacgggggtacccactccctcctcagggctgcagggtgctctgggaagagttgtgtccctctgtgggcctgtgggctcacttgcctttttgtccctgtcacttgggagctacccagctaagaccggtccccaccacccaggccactctgaggcttcagaacgcggtcgtcttctccctggcagggttgtttccgcctgcatttgttcagccagcaaatctttattaagcacctactgtgtgccaggatctatgtgcaagcagcccatgggctcatgaaaggcagagctggactgagattccgcacccctgggatcctcactgcagggccctgtgtatgtgcgggctggagccctggttcctgtctgcactgagcccctggagctaggcccagaggacttgacagatgtgggccctctgtctgcacagcccccagggcacggggtggcctgcagctctgcccagccagacttcaggtcactgccccatgagcctgtaggagaaacttctcactcatctgtcctgagacctgcctggagcccaccccagggagacagaggctctcggagcctgttcagggtgaaaggacgctagacactggcctgcaggctttgggcgggtaagggtagcgaaggtgaaagtggaccaggggcaggtggagcagggtaggcccaagtgtctgtctggggcagctggggacacccaggtgggctgaacttcagctgccacccagcttcagctgccaaggctcctcccgggtcagggtcgacccctgatgtcccggcaagagttccaagaacaaaggctcagaatccaccaagcggaacttgaagccactgccctgtggggacaggagaagtgacttggccggctctccggagcccagtgttgatcactgaggaccaccggatacaagtccctcctgccttcccctttagtgacactgaagctgttgaaatccccatccaccaggagctcctggtcctggggagccctgtgcaacccactcactgcctttcagagccctgtggcgtctctctcatgcgctggccgtagagcttcctgaaagcatctctatcacccactctgcacctgagagagggcggtcaggtgactggtaccccctgaagacctgggaccaggccccctgcctctgggaatccatcaaaatgctcccttctgaggccgctttgctgggcgtaggatcagccttgctttgagggctgtttaggagaggaaccccggcgctgctgctccccggaggcagccagtgcttgtgatgggcaccctgcctccagtgttctgcttcagggtgtgggatgcacagctgggggcaggggcgctgctgaagccacagtctcagagcctgaggcccacggggcatggcatgaagacccggtggttctgttcccccgggacagccttggtccagcctcactggccacatgctctgccgagcacacccgctgctgtccccagccacccagccccatgcacaggccacgcggcgacaggggctgctgaaggaaggctggtccgctccctgcctgtgacaggagctcaggctcagggcagcaggggcgctcagctgggccgcggctccacggtgttaagggattctagaaatttcctgctgtgccaggctgcagcagagactccggccccaccaggcttcctgtacttggtgataaacacaccatccgcactgcctgcggctcttacaggagtctctcgtgcaccattgctcaacccccgagagttatggaaggaagggaggctggggtgggtgccccgagtgccttgttggagtggaggctggcgctgccctgccccacagggtggctggcagggctcagcagttgcctggcctgtgggggcagaggacctggggagacatgctgagccctcccagcgagacactgagggtcgggagggtaacatgtgattttgaggccacccgctacagcttcttgggacctccctctctcaggcgggtctggaacccaacagagctggtttgggccacagcagtggcttcccaggctgggcttcaaaaccggacacagggcgtggctctccctcccagcctgccagagggaccgctgggcctatctccagccacgtgggtcgcgagagtcgacctgggctgcgtgatgggggaccccaggctgggcggcttaaaccgtggaggtcgccctctcacagctctggacgatggagggccgagacccaggtgtgggcagggctggttcttctgaggcccctcccggcttctgagggtggctagcaactgtcttctagatgtagtaccccaatcccccccagtccctccctttacctcacagggcatcctccctgcgtgtgagtctggagccaaatttctcctctatgtaaggacaccagtcttactggattggaggctaccctactccactgtgacccccctcctaactgatcatatctgcagggaccccatttccaaacaaggtcttactctgagtactggggattagggcttcatcatatgaatttgagggcaacccaggggtctccaaaccatggcccacagggtggctccctgtgtgtgtaaataaagctttattagcacacagcaccacatacttgagggcctaatgcctctggctgctttgtgccatggcagatttgagtcctgccatggagaccatgcagcccacagggcctaagatttctactacctgaccttccaggaaaggtttgccacgctatttatttagcaggataattttggaaagagcagttgctaggggcatttaaacttgcagtcgaattagtaacaattttattttttgggaaaatagaagtgggagagcgtgtgccccgggccagcccaccgtgccccacgtttctacagtgcccaggttggcgcagggccttttggttccacagtctgtgtctttcttcctgggtgtctgaattttgatttaatctcaggcttgtcagaacgagcagctcccaggcaccctctgccaggtcagcagtggctttcatcttctgccatttgctctgcacgtttctctctatatgcaaaaacctatatgggttttgtggggttttttgttgttggttttttatttttatttttttgagagagagagggtcttgctgtgttgcccaggttggagagtagtggcatactcacggctcactgcagcctcggcctcctggcctcaagtgttcccacttcagcctcctgagcagctgggactgtgggtgcgtgccaccatgccccgctaatttttgtattttttgtagagatagggttttgccatgttacctaggctggtcttaaactcctgagttcaaacaatcctcccacctcggccaacccaaagtgctgagattataggcatgaaccactgcactcagcctgctttgtttttatcctgagtcatttgagagtaagttggaggcagtatgaccgtttctccgtataaagcccgtgtatatcctctggaatgaggaccttcaacttagccagggtgtccgactctcaggacaccgctgtccatttcacagcctgcatttaaggctcgtcactggtcccagtgagtgtggctggttttttctcattgcacatggctgtcacgcggtttcagcttctttgacctggagcagccctgcccggccttcccttcttggtctctctcttgggcagggaagggcggtggacatggaggcttggggacagtcccctggccccacggatgttgtgtggacgagttggagggctcacaggcccctctgtggggcccagggcagaggcagcaggcaggctgtctccaccacgatggacatcatttatgccccagccaggtcccctgtcccaggaccgcggttgacagggtttggattggctgcgttcctgtctgaaggcagctgcttgggaggaggacagctgacattctttcatgcgaaatctgcttgcgggagagtcgtgaaagtgggaatcctgggctggaaccggaacgttccccgagtacataggaatcctgggctggaaccggaaacttccctgagtatacggggccttgtgtgtggaggggccctacggtgaatcgttttctgtaacaaaggcttcctctgtgcagcccacacacgggcctcacgttatcttctgcaggccagaattgtcatatatatcaagtttgttcagaacaagatggggtggggtggggggcagtgaggggcctggggcaggaggtagaggaaactgcaagattttttaaaccttctccaaaaacacgtaacccgattctgtccaagcgatttgtgagaatggggttgacacccctgggctggaacctgggaaccaccagtcagcgtctttcctccagggaggctgtgcagagggaaggcagtgagccccacctgggtttgaggaacctggggcttcaagggaggcggtctcagcccatggtgctccggccaggggtggggcagccgaggcatgagtggatgatgtcccgtcggcagcccgtggtccctctggggggcaaggtgcctgttccccattgctcctccaccagaacacctcctccagatctccgccaggtgcgccccctgaaggaaaaggggatgggggcctggctcgtgcctggtggcaagtcctcttgggccccagaaagaccccataatggccaggtagaagctcctacctgctgctgcctgaagagtctggggccctgtcggctggttccatcgtcttccctgttttcaagctacaggagcgcaatctttccagagcattgagtggctagaggaacgggcttacgctaggcaggcgctggcatcttagacaatacctgacatctttgcgggagctctggtgagaggccccacaagcgtgtgaccctgtgcggactccaccgcggcagcctgggagccaagccgatggctgtgctggccgaagggaacaccgccatggtgctctgctctctgcagccctgggtctggttggaagttgcatccctggtgaagggcggccgcggctttccagctctcccaggccagttcccgtgttttctctcccgccttccccatagtccaggacaaaagtcagaccttggtggggggtgcgcctgctgcaggggcccccaggcttctccattcgggtttagtgggattagagtgtgcggccatggggacaggtgtttcctttatgttctgcctgagggctggaaagagcctcatcagtgagtgccacgttcggtgggggtctctggtgcaggggagccggcgggccgggttgggttatgtccttgttttcacatctgaccctggccagctggagagcctcgcttgaagcgcagggcagcagctgacacaacacaacgggacgggctgagcaggccgggcgcaggcaggcttgggggagctggcactggcactgcacgtggggctcctagggggctgctagggaagtcattgggggataataggatccaccctgtggggcccactggccatggagtactgcacagtggggtccacccgctgtgtccctgaacaaggaggtagcctgaggtctcctctgacgctgggcagcagcctggggagggggctgggcaggtgccaggggaaccccctagagggcattacattcagatgagttctaattatgttcttggcttcccaggtcacacagagtgaaaaccagaggccctggccgtgcaccattgaagtgtgtcatcatgtgactttgcaggttggggggacagggctcggtgcggcctcacggggtcaggagccacggctcgagcacctcggatcccagccccctgttcagggccaggcctagacagctcttcccacgagattttctttctcccgggtataaaactggccaacgggatgcctggtgggatgactggggtacctggggccaggggcggccagcagcctcctcagtagcttgtgggagatgctctcaaccccaaggtcagctccagctggcctcaggaggagtggatgttcccttcaggtgtctttaggaccctggcaactggggacaatagtctcctccccaaatatgcagtcttgactcctggccacttgggaaggtgcgttctggtcctctgggcctcacagctttgtgccctctagggtggcaatgggaggcagagagcacagcctggggacttgctgtgaggggactgcatttagatttttaggtgaagccaatccctgttgggctgagaaaagtcctgggcggctgtgagctggtggtgagttttccagacttggtcatggtcaaggtagttgaagtcgggggttgaaaaacacactcgtgtccagcccagatgccttatggagaagaggatgcacaggcacacacgcacagacatatgtgcacggatgggcgtgtggacgtatgcacacataggtacccatgtggacacactcacgtgtgtgtgcacgttcaggctcagacacgtgcctgcatgcacacgtgcacacgtgcacacccagccctggacctcaggcaggcagggagagagacccccttggggccgcgttccatttgcacatttaatccagaaactgtcagcatgggaagcctggatgagaacaaaatgtcaagtgtgtgccgagaggcgcaggccagccccttttcctggcggggtgatgatctggtcagtttccgagcaccatgtgctgagaatgatgcgtgcattcagagcagcatttggtggggaacctgggggaagggcgggcgtctttatttcattttagctttctttagcggggcctgtgtctcttctcactgaccgttttctgaaactggctggggagggtcagggatggctgctgtcctcgggggagggactgagctgggcccttttcgttggttagttctcagtgtggcctacccagccaggtccctggacctggcggtggctatgaaagcctgggattgaggacaaagccatggggacgccgttttcgggatgcttgtgagcagggctttgtccccaccgttaggatactctgaacgttcccagaaagcccccttctgctcaagttctcttgcttcatctcaggctcaggtgttttgagtttttttttttttttaaatgaggacatctgttagaccacttaggagttctagaacctttggaaaaccccctctcatcccgggagtttgtaagaatttgtagtttctccccagagttcatggagcccctgtcagaggcgctgaggcccaggtcctgtggctggtcctcgcatagacatcagctaagggggtttgggggccagtcggcagcctctggaggcctctgcacccctcctgtgaaaggccggcgcagagctgcaccgtggggtcccctggcttggggtgggcctcagaggctgtcgccgtgcctgctgtggctctccatggccctggagcctgggattgcagaaagactcccagaccttgctggggaaactccaggatatgggggtatccagactcctgagacttccccgtgggtccacacacgtcaccaatcctctctgcacctcagcttcctcatgtgtgaaattcaggtcatatcaggacctcagttcctggggctgtgccgagggtgtggggacattgggcatgaaggttctcagtccagagccaatggccaagagggcaaaagggtgttggtggacgatgcctcctcccctggcgggggcggggaaggaagtgctaggggaagccggtgtaaggggccccgtgcccaccaaaggcgcgctaattgcgaaggaggggcctcagccaggaaccgccatagcctcagttttatttattctgctcactcaaacaaaaaatcagctttgttgaggtataattggcatagagtggaaggccttgtttaaaatgtaggatttgacaaatctggacatgggtgtacgccacaggaccatcaccacaattgagacagcaggcacatccgtcacccccagaaggcttctcgctcccgtcgctggcccctcctccgctgctcctggctccggaggggacccctggtctgtcttgtcagtgtagacggttggcgttttctggggcttgttgtcagtgcaatcatacagtgtgtggtttttattgtctggttccatatttgagagtcatccaggctgtggcatgtaataattcattcctttttcattgctgagccgtatcccattgtacggacgcattgcagtctgtttatccacttgtgtgctggcggactctgtataaaagtgtttgtagggacttatatttcctttctgcatgggtaaatacctaggtatagaatggctggataatgtggtgagtgtatatttttaactatttaagaaactggctaactcatcaacccttgacgtggtccgtcattttcatgttagccagtctaagaggtgtgcgtggcatcctgctgtggttttaactttcatttcctaaggaccagtgatgttgaatatcttttcacgtgtttcattggcatccaggaaacatctttggtgacatatctttttaaatgtttcacccattgtaaaattgggctgtttgtcatctgagttgtaaaagttctttgtatattctggttacatagatatttgttttacacatgtattctctagtcggtggctttccttttcatttatttagtagtatcttttttttttgtttgagactgggtcatgcactgtgctcaggctggagtgcagtggcgtaaacgtagctcactgcaacctcgaattcctgggctccgaggatcctcccacctcagcctcccaagtagctgggactataggcatgtgccaccacaggtgctaactttttaaagttcttgtacagacagggtctcactttgttgcccaggctggtgtcaaactcctggcctcaagcgatccccttgcctcggcctcccaaagcgctggaattacaggtgtgagccactgctccaggcccaatagtatcttttaaagaccaaacattttcaattttatgaagtcaaatatagctttttccttttaaatatgtttcatgcttttcacattctatttaggaaatgcttaccaaacacactcttactaagattttctgctagtagttttataatttttgtgcttacctttaggcctaggatgcattttgagttaatttttctctatcatgtaagacataggcggagattcatgtgttttttcttatggatgactgactggtccagtgtcatttgttgaaaagagtatcctttacccagtgaatcatcttgactccttttaagaggttcagtttatcataaaattgtctctttctggacactctactgtgatccgttgatctgtccttttgccagtcacacactgggattgttacagccctataatacggttaaaataagttagggtaatttagccaactttgttttgctatttcaagttgtgttggttgttcggggtcctttgcatttacatataaattttggaagctgcttaccaatttttgcaaagcctggtagaattttgtttgggattgcattcaacctaaagatcaacatggggagaattgatgtcttaaccaatattgaatcctctgatcaatgagattatctatctcatatatatatatgtgtgtgtgtgtatatatatatgtgtgtgtgtgtatatatatgtgtatatatatatgtatatatgtgtatatatgtatatatctatgtatatatatgtgtatgtatatgtatatatatgtgtatatatatgtgtatatatatgtgtgcatatatgtgtatatatgtgtgtgtatatatatatatggttacatacctaatatgtatatggttatatatctcttataagggttatatatctcatatacatatgaggttatataccacttatttagatttttaacttctgtcagagatgtttcatagtttttagtgtataggtcttgtacatcttttgaggtacctaagtgtttcatattttttatgctatggtcaatggtatttcttctaatctagaactgaaattcattttgacaaatttatcttgaatcttgcaacctttctaaactcatttgttccagtggcttttgaaaaaatgaattccattgatttccttatatgaatgatgttttctgaacatagagacagttttacctctttttttcaaatgtggacgcctatttgtttctttttctggcctgattgcactgggcggctcatccactgcagtgtccaatacaagtgaacactgctgtgtccccagccttagaagacacacatcattgttcaccgtcaagggtgatgttggctctgggtttccatagatgtctttaccaggttaaggaaacgtcccctctaatactatagctgagagcttttaatatgaatgggtgttaaattttgtcaaatgctctttgatacatcttttgatatgatcatgtgctttctctacttcagtctcttaatatgataattacactgattcattttcacaggttctgtattcctggataaaccacacttggtcatgctctagtattctttttgtatatcactggacttgacttgttaaaattttgctaacaacctttgcatctaggttcatgagggatattgtctatatattttcttgtaacgtctttggctttggtattagagtaatgctggcatgaggagtgagttgggaagtgttctctctcccttttagaggtggagtttgtgtagaattggtcttatttcttccctctgtgtttggtggactccatcaggaaagttgtttaggtaggcctggactttgcttgatgagaagattgttaactagattttaaattgacttaatagttttattcaggtgattgataatagttatattcagttgattgataataattatattcaggtaattgataatagttatattcaggtgattgataattatattcaggtgattgataatagttatagtcaggtgattgataattacattgaggtgattgataggtgataattatattcaggtgattggtaattatattcaggtgattgataattctatttaggtgattgataattctattcaggtgattgataatagtggtattcaggtgattgcttcttgagtgggctttggtattttgtgtatttgaaagaatatgttcatttcatctgggtgttaattgtattggcataaagtttttcagaatatcctgttactatcctttaaacagctatagaatttgtagcaatgtctcttctctcattcctgatactagtaatttgtgcctctttctttgttagtgtaatcagtcagctaaagttttagcaaatttatggatctcaaagaatcagcttttggtttcattattttttttctttttggttatttgattaattttaattattttattctgcctacttagttttaatttgttcttttttttctcgtttcttaaggtggaagctgaggtcattgaatagaaatttttttttcctttctaatacaggcacttggtggtataaacatccacaaattttgtgtttttttatcccatttaaaatattttctaatttcctttttaacttcttctctggtgtatgcattatttaaaagtgtattcaaaacatttagggattttcaagatacctttctgttactgatgtctaatttatttatggctatagaaacacttaatataatttggtctcttaaaatatattaagacttgatttagggcccagaatatgatttatcttggtaaatactccattgtgtgcttggaaagagtgtgtactgctgttgttgggaggactgttctataaatgtcaatgagactaatgtggttgatgatggcattgtccaagtctacatcagtaatgatacatccttactgattttgtatctacttgttctattaattcattcttgggagaaggatgttagaatctccaactgtatttgtggatttctctctttattcttcagttctttattctttattagttttttgtttaatgtattttattttttgcttttgtcatttaaaaaattatttacattctttatttttcatttttgtggatacacaatagttgtacatatttatggagtacatatgatatttcaatacaagtataccatgtgttcaatgtgttttgaagcttcgttcttgggtgcattagcatttaggattgttatgtcctcttgagaagtcaacacatttgtcattatgaaactgcctctttatccctggccactttctttgctctgaaatctgctttgtctgagattaatatggctattctggctttttctttttatcattgttagcatggtatatattttactcatttactttcaaaccatttgtgtctttagactcaaaacttgtttttcatatgaagcatatagttgagtcttattttgtgagtcaaactatttttctcctgaaaagtacagctaatttgcatttattcataggactgacattcttggtctcaactctgtcattgtcttttataattacgtgtattttgtcacggttgctgttgtagttttctttacaatatgtgtattattttcttttaaaaacatttgggtaattaggaggttgtattatttatttatttatttttgcgaaacagtttccctctgttgcccaggctagagtgcagtggcatgatctcagctcactgaaacccccatctcccagggtttaagtgattttcgtgcctcagcctcccaagtagctgggattataggtgggcgccaccacacctggctaattttttttgtattattagtagagacggcgtttcaccattttggccaggctggtcttgaactcctgacctcaagtcatctgcccgcctcagcctcccaaagtgctgggatcacaggcatgagccaccgtgcccagcctgtatttttgtcctaatagttacctttatacatatgcctttcaaagtttccttggtccctggtttctcatttaaccctttactgtctggcttaccgtttttattaatctgccttaacttctacttagtgcctataccacaaacaataagctgactccatttccatcttttataagttcagacccccacaaccttgggtggactactgactacttcgcgggtaagaaatggtgagtggcatggaaggggaggggcggcagttctcagtggagcggccgggctgcgagtctctgtatggaggtgaaggtccagatgttggggtttcagggtcaagcattcctggcagagagcatggcacgtgccaagacccggatggggcgtgtgcctggcgcgggtggagggagctgtgaggagcctgtagcattcagagacaggggagcagggagcggtgggggatgaggtcagggaggtggcaggacctggcgtgtgagggcttggggcgactctggggagttagggtttcgctctgcatgacaggagcctggggcctggcatggtgtgactcagacttaacgccgcccctctgactggtagaggccaggcccaggataaggtggcggcaggcaggtctctaagcagtggcagctcagacccgaggtcccagggtcatgcgtgtttgtcctgattgcacgagtcgtgtgagcacagaaacgtaggtggaaagatggtggcttcgtccagggaggtagactgggaacgtcttttgctgcttcccttggattttgtttctcaaagtctgaatcaagcgtggcagaagaaaatacagcagaacatgggatgggaatatccatgcgtataatcggtcaggttagttgctgtattctgacttatttgaaagatttcatagcgaacaaagaaaaattccggtataactataatttttccatagcagtttatattccctttctcagccttgtaggtgtaggtggagtgtcctaagctctgggggtggggggacacgtttacgtgtctgcaaaccgctacattctgctaagacatctcaggagcccgccaagcccttagtgaaaagtttcttaaggcggtttcataggtgcgtgtggggctgttggatacagtgacccacttcaaggtgacatcttcttcttgcatctcagatagcaccaggtttgtgtgtttatgcgtgtgcacacacggtgttgggctctggcggtggcctgggggtgcttaggctgtgcacaaatgcccacgcacgtacacacacagacacacagcctgacttggcccaggtgggtgggtgtctgaggagaagttcgccattgtcgactttggggtaaagtgaggacctgtctggcgggaataaaggggccctactgtcccccgactaccactgccccagccctcctgagcccctgtgactgaaaaatcctcactttggaggatgtttggtgacaggtgctggggcccggacacgacctggtttcttcatcccaggggctgtctccagggtgggttctagagtacatccagcttccacccaagggagagtggctgggtggagagggggcaggctgagatctgagaagccaggctagggggttgtggagcaaatgatgatgtctcaaccatgtggctttaggtccccagcacgtgctagtggccatcagcaggctacagcatccagccagtgccaccaggagcccactggtgccaggatgctggggtggggctatggggaaggaagacatgtgggccagggtgcggggtgcgggacaaacctgggtccaggcacctggggcgaccctccttggccgtccttgccatcctcgccatcctctctccacacatctgacctttgcctgctttgggggcagtttgaggcctcagattttctacctcaaagcgatggaacccagaagacatggggccctcgaggagggtcccccgggggctgcaaaagcagagggagtggagtgtcaccgggtgtcccggcgtgggcaggtcctgttgtggagcctcgtgacctgctcatagcacagctgggacacttccagtgactgctctgcgaggcccggggtaggggcgtgggggggcctcctcctcccaagcacctggggtgggaacaagaggcgttttgtgttctgcatgggtggccctgggctccccaggcctggtgtgggggtgcctggggggcagtggacgtgagcagcagcacgtggcccccagtcatgagtaccccaggcccctatgcgcctccttccccatgactggccctgggtggcggagagacccctgggcaggacacccctccctggcttttccttctgcaccactcaatctgggggttccggctccttgcccaccgcccccgccacccagcgcgagccgcgtagaggagcaggaagggagccagctccacctccagtagacccagagacggggaggccagggtgcaggggactgtttgggcctcgagagggacggaccccagaactggaccccaatgtgcaggtctgggtgtggatgtatctgtatgtctttgcggagctcagatgagagatgctcagagttgtctgtagagaaccagagctgccgagccccggcctggatggacatcccgcaggcagtgcacgtccctcccccgcctctctttgccgttgccgggactgggccgtgtgcctggagtttgaacttttctgatcacggggtgagagggtctttgcagttgcagagccgtggcgcggcgcctggatttccgacacactgcagcatctgcatccttgccgtcacccctcacaccccctgctagggtccctctgggggttgaatgaaaaggcataggtagaaggtgggagaagcccacgttctgggagcgtcgcagtggcccagacacccatgttcctccctaggcagctccatgcgcgggccccggagctggaaagcagccaagggcactgcccgccctgggagctgatgcctgacatgcatcctcgcctaggccagagtgccaggcagggtaggggaacaaatgccaacacgtgagctgagtgaccggaagagggggcgcctccctgagcaggtgaatgaagggtgctggggtggcgagttgagggccaacagagatggtgtcccggctgatgtagggtcaggggcttctggaaggagcctcacaggaagggcagggcagcaccaggctcagcccaggaccagagcgcaaatagggctggagtcccgagtacaaggcatggacaggagccaggcttcacctagcacctggctccccgggggcccagatggcaggcgaggggtgcctggggaggctgccaagtgaggggggggcacagactgagacagggtccccgtgttccatccatggggtacagctgctcccaggccagactctggtggtagcaggaggcaggggaggctgtgctgagctcagtgggcttggtggggtcatagctgcctctccctctaaatagattaactaaaaagtattgttgactgactcatgcatttcttaggttttcttattttctaatttcttcttttaaatttaggtttgtcgaggtttaagttacatacaggaaaactctccccctctgtagatgtccagttcgatgagtcctggcaaacatttatggtcctgtaaccacccccaaagtcaagatccaaggtgttcccatcacccgaaagctccctggtacccactggcggctagcccctccccgcacctgggaaccgtggacgtgtttcctgtccccatggttttgccttttccagaacgtcatgtgaatggaatctcgcggcgtgtagcctctgcgcctggcttctgtcacttagcataattcatttgaggcccatccgtgtcatggtctctgcattcagcagtttgtctccttttatttggaaaggataaaatgtaccacagtttgtttatccattcacaggctgatggacatttgagctgtctccagttttcagctgttatgattaaagctgccatgaatattgcgtgcagttttttgagtaatcatatgtcttcatttctctggggtaaatccctgggagtgggattgcgggatcatgtgttagatgcatattttcctttcgaagaaactgccaaagcattttgcaaaatggtaggcccgttttccactcttaccatcaatgtacgagcattctggctcctatggattctcaccagcacttagtattgtctgctttttaagctttgcccatcctaaaggctggagccatattccgtcatggtcttcatttgcatttccctagtgacgaatggtgttgggcatatttgccattcatatatctcctttgatggaggatctgtccagtttgttgctggttttaacaattaggttgtcttcttagaataatcatgtgagttgtaagagttgtgtctatgttctggatatgagtccttcaccagatctgttttacaaatattttctcccagtcatggctttgtctttgcattttcttaacaggatctttcaaaagagcagcagtttttaattttgatgaagttcaattcatcagggttcttctttttttttttctttagggttcatgttctttgtgttctgtctaagaaatattcgcctaatccaagattacaaagttttttctcctgttttctgtagaaattttatagtttcacatttcttgtttagatctgtgattcatttcgagtttaattttatatatggtgacaggtatggatggaggttaaatctttctgcatgtggttatccagttgtcccagagacttttttcccattgaattactttggcacctttgatgaaaatcagttggccgtgtgtgtgggttcgatttctggactttgtcatctgttctgccaggaaagcactgtcttgattactgtgacttttacgctaagccttgaaatcaggtcctgttaatcctccaattttgttcattttcaagagtgagctgttctgccagctccttcacattctcatgaatatcttagaatcagctcgtcaattctaccaaaaaaaaaattggctagaattttgattggcattgcattggatatgtagataaatttggatctcatacacgtcttagtaataccgagttttctgatccacgaacacggtctctctccccagtgcctcatgcacgtcttagtaataccgagttttccgatccacgaacacggtctcgctccccagtgcctcatgcacgtcttagtaataccgagttttccgatccacgaacactgtctcgctccccagtgcctcatgcacgtcttagtaataccgagttttctgatccacgaacacggtcttgctccccggtgtcttagatatttttcaacaccactcatcaggattgtgtaatttttagtggtgtgaaacttgctagatttgttcctaagtattttatgtttttgaagctactgaaatgatattgttttctcagtttcacttttggattatttgttgctaggatatagaaatacaattgatttgttcgtatattaaccttgcgtcctgtgactttgctcatgttacttattagtttgagaaggtttcttgttcatctgtttttggggttttttttgttttttttttttttgtttttttgtagattctttaggattttctatggagatgattgtgttgtccacaattaagtcagtcttatttttgccttttcagtccatatactatttatttcttgtttttacttgaatgcacctgacagtgtctgccagtggggagagggctgctatccttatcttactcctaaggtgaagtgaggtaatctttcaccattaggtgtggtgggagctgtagggttttagtagaagccacttatcaggccaagaagttcctcctcttcctggtttgctgggaatagagagtgcgtcaagaatggctgttggattttttgacaagtgctccttctgcctctattgagataatcatatcatttgcaacaatctcaatcaaattctttcttaatttgctagtgtggggaatcgcactgattgactttcaaatagcaaagcaaacttgcttcccttacacaaagcccacttggtcatgatgaatttttattttattttattttatttatttatttatttattttatatgtatttgtacttttttaaattttttatttttttgagatggagtcttggtctttttgcccaagctggagcgcaatggcgtgatctcggctcactgcagcctctgcctcccaggctcaagtgattctcctgcctcagcctcccgagtagctgggattacaggcgcccgccaccacacccagctaatttttgtatttttaggtagagatagggtttcaccatgttggccagggtggtcttgaactcctgacctcaggtgatctgcccgccttgaccttccaaagtgctgggattacaagcgtgagccaccatgcccagctgtcatgatgcgttttaaaacacctttttggatgtgactgacttcggttgtgtgtagaacttccacgcccacgctcacgagggcgtcacctgccatgtgttggctgttgtgtctggttttggcatcagatgccgctggcatcagagaatgagttgggaaatatttcctgctcttcaatttttaggaagagtttgtgtagaattgcaattatttctcccttaaacatttgatagctagaacatgtggaggtatctgggcctggagttttctttgtggagaagtttgccattggaaagtcagcagatacagggctatgcaggttgtctatttcttcttgatgaggttttgattgttcatgtctttgaaagtatttgtccccaaggagcagaagccccagcccaaatttggaaacaagaccatgttgtgctgacatgtcattcctgagcagcttaggggctgtggggtttgcagacctctgaatgcagccatctgcagggggaccctcctcagtgccctgagagggggcctgggctgggtggtctctgctgctggccatcccactgggcactgcctccccagggattctgcaacaggacaccgtaaggggcacgggggacaaagatcagactttctctgtttccttccagctttgctccccagggaggcagtcccttctcagaggaatgaaatttaagaagacaggccctacaatttcacgacaagtctgcttttgactctcccgtttactgtgtaaacttcagccctaaaacaacatacatccttctgaagttgttcacatattagctcttaaaacagcaaaatccgtgcacaatttcctctcaatcccttaaaacattcctgaaagggggggaaaacaactgtttaaattcaccgcctgttattaaaatctctagatttgcagaatcagagtgaggtactcagcagtcagaaaacagactagacaggcccgtgtgcacacacgcgctgacacacgtgcacacacacacgtccacagggcagcctttaataaccgcaggccttcctgtcccaacactgcgcgggcccctgaagggccggtgtgggttgcagctcctcaatctctgctaaagtaaacagggttcaaccctgcggccttctcagcactctccccaagtcaaaagaagggtgctcagcccctggtctctttggtttgccaaacttctagtgctggtgaaattcttaaatatgacatttttagaagcttcggctcctggcagataaaaataatgtcccccgctccacccccttttccccctatcccagttctagctaagacagtgatcagaggggtgcaccgtctttggggttaacagccatcagcagtggggttcccaggctgaaactaaatcctcgtttaactggcctggagacggaaacagccctgcctggggaagatgggggatttgctttaaatacgtgtaaagctgcctgccaggcggctaatggtgtctgcagccaggcgtgggcgtctccgggccatgggctcccccaccacaaattgcagggcagccggcttgggccactcctgtgtgtgcggggccctgggtatgattcctgggaggcagctcccaaactgtggggctcagcagaggattcagggcctgatttgcgggcagccccacctgcctttttgactgttcagagccctgagtgcctcccatatgcccacattttcctgcccctgggccttttcttctggtcatcggcctggagtgcctccactggcacattgagttctgccttcagagcctgggttttctggtggaatggggcaggggtaggctgatagacctcttggagagacagggcccactttcttgtaggcccacagggaccccgcctggggagagagaagcttcaggccctgaggcctatggcctggacctctctagagaccctagaacagacctctggcctggccttgctgatgacctggagcccctgggtgccagctgcagccccctgcctgtccaggagtctgagctccaggtatcagcgaggtgggttcgttctgaggctgtgagggagtgttccaggcctcccccagctactgtggaagggttcccggtcgacgcatcgcaccagaccctgcctccgcctccatacagcgccccccggccggcaagtccatgtccaggtttcccgtttgataagaacaccagttgtatgggaataggggcccaccctaaccacctcatcttacctaatagcatctgcagcaaccctatttccaaacaaggtcacactctgaggtgtgctggagggtctaggacctcaacatatgaatttgcggggcgggggacacagtttagccggtaggaatacctacctgtcagaggattctttaatccaagggtccgtaaaccatagcctacaaacctggctgctgatctgtataaataagatttgattagcacacggccacgtgtgcttgtgaacatctcatctctggctgtttttgtgctataacagcacaaaattgtctgctggagttgttgcaacagaaatcgcgtggcctgcaaagcctaaaatatttactatctggctttagagaaaaagcttgtcaagccctgttctaaactatgaagacaatgttggaggttgctttctatacccacagagccgttgatggggtgaagggagaggggtgaaatgcagtcacacgcaaattcttatcttcctgaggagaaagccttagggagcccactacagtggacactgtctttagagagtagcagacctggctgtgagtttgaggaaccagtgaaatgagagttcagtgacatcctcaacttcatgaggatcagaacatggataacatgtggctcaactaaacaaccaaaagcaaaagggagaagtcaacagagtcaaatagcaaatataaggacagaaagagtcaaatcaaatgcctccaacttcacaccaaatgtaaatcgcctgaattcctctttgaaagacagagaaggccgtgccgtagctctgggcttttatcttttaacaaatacattgctcagcagcattaagtaaggcaaagcaataatgggtggttgaaaaataaaggaatggccaaagagaggccaagaaactgcaagctaaaagaagaaaaggagagaaaaaacagggagatcaggatgaatatcaacactgaagcccaaacaagacaagtgtgaatgagatcaggcactattagaagacctgactgtaatctttaaggcatcatacaacataaaatacataaagcaaaaactattgaaaatctgcaaggacaggaaggttaaatatgataacgggaggagattttaatgtacctcttttggaataggacagttctagtgggcacaaaataagtgaggacatggacaggtaaatgttgtaatcatgagcaatttcagattctaacagtaatttgaaataactcctgttcttgttatctatagccatgtaacaaaccatccacaaatctagcaccttcaaaatacgcatcacgcctgagctcgctagcctacagtctggcagggctcagtgggacggctcatctcccctctgcatagtatcagctggggctggagcctccacagcattgcatctacatggctggtaaggctcctgttcatgagggcttctccaaggctgcatggattcctcacatctcagaaatgaacagtccaggagacaggcagtgccagggactgagagccacctggctgtattctcctgatgcaggtgtcacagagcccaggttcagttggggaggactggcaaagaacttcataggactgtgctttaaaaccagcactatcacttcgaaccctagtaatggagttgttttgttcccttatgtctgcggaacacttacaaaaccaatcattcatgtggctacaaacaaatctaacctacctcaaaaaattgagatttaactggccatgttctctgatcaaaacccaatatcatgagaaataaatgattaaaagattggggaagaaaaatcccttacctatttgggaattaaacaacactctcctaaatagccagaaagaagagattgatgtgggaagtgcgggccctgtagggcgttatgagacgtaggccccgctgcctgccccagcccctacatcactccagctgccccccagcaccaactgtagatgcttttattttgtaaattccatgccagtgcccacatcgcttgctggtggcttcactgtgtttgcaaatgttgtcccccacgtggattgaaattcatctattgcctgaaagtaatgaagtatgtgccttgcacactgtgtaagcatacgtgtttattcagtgcgtcctgggttctcaccccttgccaggtgatgggttgattcagtgtgctgggggtctccaggcgggggggtccacatagtttttgcttcatcagaatctgctgataagcccagttcggagcagagactagatgggccagcctgtgggcactctgcctagcgccatctgcctctcccaccccaggcaggtgtcaggtggctgctgcgccctgtgtccgcctcctgaccttgagaacacccaggtgggggaggaagtgggccgcgcttcgggaacccccaccccgccggcttgcgcagcgagctgggtcccagggctggaggcacctcattaaaccgcctgaaacgtgtgtaactctagtcggcccccgtaaggcaccggcagtacatgtgaaattaaaattactgagaggccccactctcctcccctccatgggtgggcagccttcatggggaggccaaggcccggaagccggcagtcctgggaaagatttggccccaatgataatgggcccaagaatgtgctaggcccagggtgtggtccaagttcctttcttagctaacccctccaccctgagaagcctcccccactacacccacacatggggccagctgccttgagcacctcctgctcagacccaggtgaggtacctgagtgacaaatgtcaagagtttgcagttactcccagagctacggacaaggggcaaggtggggctggaggcaccggctcagcaagaggggtcacttgagccttggcctgcagggaggttttgctcaaggagtgtcccttgagcaaaatattgcactttcgttgctctctgaaagcctaccaggcagtcttcccagaggtgcttcccgggaagcccgtggagaggatgcattcgacacccaaggccttatggaatcagtcctggggcctggagggtcgtagagaaatgtgtgaacatggctccccttaggccaggggtagacgcaggcacagggaggatcaggaaagccctggatcttgttgacaccccgggatgtgcccttgtggctacttagacgtagagcccggggcagggggagggccagcccctgtggttttagcctcctgagagtctccccagacagcccacaggggacactgggcctcatgccgcctgtcaggatggtgtccgggatgtggggaccagacgacagctgtcacccacttgcagggcccggctgcccggtggatgggaacggccatccccatgacgacccagcaagtcccttgcctctctcgctcaccaggaagaagacacgtccgggcagctggcaggtggggctagttctggagggaaagcggcctcgtgcctcccagagtcaccccgaaatcattaacggggagacaagcacacagagcagctggccgattgcagctctgaaggtcagagatggccgccagctgtgggaaggcctgtggctagggctctgctgcctgcttcctgggcaggggctccttcctccctctctgtctctggggtcccatgggaagtcagggtggggcctggtgtgtggcttccgctggtttcctgggtgtgtcttcctgcagggccaggacccccagagtgttccagtgacttcagagaggggcagccagaccaggaggagctccagaggtgccctgtggggagaggcagcgtcccaaacacgggggagggggtaccgccagcctggggacagatagcagcatctcagccatggggggccgtgacatccggtcaggagggggttagcatctcagacatgggggggagatgtccagcccaggggaatgaggggggtgatgtccatcctggggaggggtgacatccatcctggggggacggaggcgtgacgtccatccttgggggatgggggggtgacgtccatcctgggggagtgggggcggtgacgtccatcctgggggagtgggggcggtgacgtccatcctgagggaacaggggggtgacgtccatcctgggggaatggggggggtgacatccatcttgggggtactggggggtggcgtccatcctgggactggggggtgacgtccatcctggggggacggtgggggatgtccatcctggggggacggggggtgacgtccatcctgggggcgggtgatgttcatccttgggggacgggggaaggtgatgttccttctgggggggcgggggggggtgacgtccatcctgggggagacagtaacatcccaaacatgggggatgatgtccagagtgggggtcttcaggtctttacgggcccctcagcctccccttccacaccccaagtacagcacccacaaggcaggtgcctgggagggagacacacctgtcccctgcctgaagtttctcagcaggattttgggcacaaggtgggtagtgagctggtctcagcactgagcttgcaggtggagaaggcgggcccctgactttagggcgctctgggtgggatgaggacagacgtggaggaaaggagggatcccagcagaggcagcagtggatgggggagggcttcactgcagggagagtgaggctgcgcggtgccctgcaggacagataggaactcccaggcctgtaatcccagcactttgggaggccgaggcgggcggatcacgaggtcaggagatcgagaccatcctggctaacacggtgaaaccccgtctctactaaaaatacaaaaaattagccgggcgaggtggcgggcgcctgtagtcccagctactcgggaggctgaggcagtagaatggtgtgaaccccagggggtggagcctgcagtgagccgagattgcgccactgcactccagcctgggcgacagcgagactccgtctcaaaaaaaaaaaaaaagaaaaaaagaaaaaaaaggaactcccagggtggagctgtggacagataggaacttccacagccaggaaggccaggtgacgtggagggccccaggcagctgggccagcacgggacggggcgtcaggtcagcggggctcttctgtgctgtgtgcagcatgagagtctgtaccccacctgtactcaggaccctgccccccgaggacaaggtcgcttccctcttgagcacatgggacaccaccttcctgctacactattcccatgccctttccacaggcccaggccactgttgtcatttcgccctccccacagtcctaggaggtgggcactgctggtgccccattttacaggtgtggatgctgagcacagagaggctgagctgctcgtctgggtcccccgcctgggatgccaccagtgtcctcacaccagcctgctcctgccctgtgcccatcctcctcctgcttagcgatcctttctcttgctaatgtgtgggacaaggggctctcagggggcctggccaaggtagcgggtccccccaccatactcccagtgccacccctggctgcctggagctagctgtgcaggggcccagaagccctcccctccgaggaggtgggcctgttccaggctaccttgggcgggcagggccttgggtggccagggcctcaggagggacacagagggccccactcaaggtcacgggctgcacgttccatggggcctggggaagcagccgagcagaaggatgcagcccgactaaggctgcctcagggtggcaccccagcggtgcccacactaaggggacacttggcaggggaggggctgtggcagggcagggtcatgtccccagcagtaaggccaggacagggcagccggaccccgactgtgccaccctcagcccagtggatggtgcatctcacctgggcctggccggctgcactgtggcgcctgccccaggccaggctaccttgggcggggtggggactggtactccccggggggtgggggtgagggcgggggtgagtgtggatgagggccccagctgtgcccagcacgtcactgggggcccacaagctctcagcacaggctggcggctgggagcagctggccacaggcaggccctgggacaaagggcgctttgagctgcctgagtgcctgcattgccctccggccagctgaccctccccggagccgaggctggctctctctgtggcttatcagggccgggccggtgtggagttggaacagctggccccaaagcccgccagccgggctctatgctgtggggaccactgcccccacagggaagcgcctggctcagcacaggcccagccctctggcttcctcgctatgggagggggtgagaccctaatcccgggtccccacagcaccctcagcctaacccctgtgtccacccctcttcagagtctccaggccccatcttggcctgatgaggcctcattgtctcctaaaaagtgtgggtacagatctcaggcttttcaagggtgggtggattcctggctccagtggaaggtccccaggcctaagtctatgggggcgccagggaggccggctgtgtttctgcatccttgaccctggccccttccacaaagctcagctctgatccttcgtatttaatcttcatcttccgccgtctttaaaattaattttcctttaaagatactgtagagcagtaacatcagagacaccaaaatagacaaaagagataatagaagagtaatatcagagacactaaagtcctcgcgataagggtctgcgaggcttcctttatgttttgcaaaaaaatctatatatttcatccagagagacaggatgtgagcgcagctggtcagaaccagttatttcaggctgccctgtgatctttcccacgtgattgattgacacagggaccttctctagggtcctaaattatgtggttccagcagcatggaacttcaaaacacattgaaccccagaaaatcttcgctatgttggagattcgccggctgataaaagcaaaacaatagataagatggccaggtcgaccttcagccttctcggagaacaccggttccacggccggttgcaacacgtttgagccaaagtgcgacctttccccgctctgttcactcggagactaaaaatcccagataagcacctgctttgctagacccttgctggccctccggcttcgggcaggtctcctctttatgccactgtaaccccacaacaccggataccagcatggggtcggcctgcggggccatgtgtctcctcctgtgtgaccttgagctaccttgagcttccattttccttccgcaccatgcactgatttcccctgggttgaggttgagggtcccagggtctgtctgcctaatgacaagatttcagtaccaatagcgaagccgtcagtggcagtgactgtgccttagggtgtcccgttggcatccagggccccccgtgaaggatggcaccgagcaccattcaacataagtcttgtcagcgttccgatgaaacaagattaggggaattttacagcttgcctgtgtttttccacccagggccctttgcactgcctgctatttgttttctgtcttcatcctgagagggctcaaggtctgcatgccattttgcaattgacaaatggcttgtgcttagctatttcgttgaatgctgaactaacaatagtcagtgaagattaagaactaaaggctcaaggacagctacagatgaccacagctggagtgcggcagatactcggggccgctgggtggccctgaaggcccacagaatccttttggagacctgacccgcgggagcccaggtgagcaaccgccacgggccagggcccctcgaggcactcatttcagtatcagagaacacacataacgtaaaattcaccatttcagccatttcagccatttcagccatttcacagcgtgcaatttggtggcatttagtatgttcacaaggcggttcagccaacacctgtctccggttccagagctttttcatcacctcaaaaggaaaaccatccccattgcccttctcctagttcctgacaaacatgttctttttaaacattatggtgaaatataaggccaggcgcggtgactcatgcctgcaatcccagcactttggaaggctgaggcgggcggatcacctgaggtcaggagtttgagaccagcctggccaacatggtgaaaccttgtctctactaataatacaaaaagattagccgggtgtggtggtgggtgcctctaatccagctactcagggggctgaggcaggagaatcacttgaacctgggaggcagaggttgcagtgagctgagatggtgccactgcactcctgcctgggcaacagagcaagactctatctcaaaataaaataaaatggaaatatgttttaccatcttaaccctttttaagatcacagttccttgcgaccatcgccaccatccagctccagagcttttttcatcttgcaaaactgatgaaagtctgtccccattaaacactcactccctactcccccttccccagcccctggcgcccatcatctactttctacctctgtgaatctgatgactgtagcgacctcacgtgagtggaagcagatagtatttgtccttgtgtaactggatcatttcactgagagtaatgtcttcaaggttcctccatgttgcagcctgtgtgagaatccccttcctttttaaggccaaatcctattccgtggtagggagggaccacatcttccgtctccgtcggtgcactgagggacactgggctggttcccctttttggctgttgtgaatgttgctgctgtggacatgggtgtgtatggatctcctttaaagagaccggggacagactccaaagtggaattgctgggtcatacagtaattctgttttttttctggcatgttatttaaacagactatttgttagagcagttttaggttcacagcaaaatcgagcggctggtcatttcacgctttaaaggagctgtggcattctacatcccccagcagcacacaaggtcccaacttctccggatccttgggagcacttgtcactctgtttggggtggcagccaccctaatggatgagaggtggcatctcgttgtggtcttgatttgcatttccctgatgattagtgacactgggcacctctccgtgtgcctcttggccatctgtgtatcttcttcacagaaatgactgtccaagccctttgcctattttttaaaaattgagttgttaggaactttggttttttaaataattttaaagcacacaaataagacacctgagagccaacttataacacgccccaggatggacatggattcacactcatggtagaacagagctgagggtgcagtgtgggatgggctgacttgtggccaggggaaagacccgtggcctatcttgttttggggggcagggacccagaaactcattgctttcaggccttgctagaaaagcatacagtcgaacgagtgggtccgatgtggagtgcagtggcatcagccaaggctccgaggcgtttcttcccacttcacatgtcttttctgttgtttctgcgaaggtgtctcagggaggggcagaacccatggggtttggcttcctgaccctgaacgtctttgtcccaggcccttcactgggtctggaggaaggagggtgctgtggtcctggtggctcttgtgcctgcacccgccttggggccatctgacacccacaccctccctccaggccagacccagctctccagcttcccggctgcccactagatgaccaccaaggcagggcggctggtggtgctgacggctctgtgaggcccaggcctgtcttccccacctcaccccacagggctgagacacctccctgtcccctggcagggctggaggctctggagtctctcttggttaccctctctctcccagggccacttttgcagcctggtgtccttatctcatgtctgggtcccctttgccaagggtcctccagcctttggcctgcacccactcatctggcagtaacagggccacttccagaaccaccaccatgcccaggtcatgtctgtgcatgagagtggtcagccctccatggcaggcctggcctcacctgccagtgtcctctcccacacccgaggacacctgtaccttgtcccggggcggggctctctctgccatggacgccagtcttccctcccctaagctgcgggtgacctgacctagttgagcctggctttcctcctctgtaaaatgtgaacagaggccaccacccccattatgtgggtctgtgtttgctctgtgcacgtctcggtgcccagatctgaggcccttttgtccatgaagccatctgcagccaggaggcggccttgctttagtctgaaggagagtgaccagggtaggaggggcctccttgtccctttggtctgtttgtggtctcagtggagaccaaggacggctcttcttctcgtatctacggggcagagctcagggccgcactccatcagcatcccgggccattgcatccttgaccccggggggcttgcaggcaccacatagatcttgtgagaggcgctttgtggggctggatgatcctgggtgcccctcagagaaggccctggggctggccttgttatcagtgggggagtcaggaagtaccccggttctgtacctgtagtggatggggctctcagagggattgggggtgatgggggtgctgagctggcctgagaagggtggggtaacctagggggtggagtgggggagggagagagcactcctgacacagggtcctgaggaggcaggggtgccccagggaatggggggcacctggggcccacgggaggctctgggggagactgggcggtgagcccctgggaaggaggcctcagggacagccctagactgtcaccctcagtgtggacagcaggagctatggcagctgcttgagcaaggtgggcaagggagaagtaccaaatgtgtgcaggttctggggaggagcttgaggcccctttagttcacctttggaacttaggaccaagtctgcaaatacagatgaacccagggttaggagggtggctggggcatcacccacctggggtctggactgctggaaccagggggaggcaggcctgccattctgtgagcctgctttagactggggatgtggtcccgtgaatcaggggtgggccatggcatggcgtgggggaccagccctcctccctgtccccagctgagtgtgagctccctggggtcttgctgtggccttggccctgggtgttgtcccacacagcccaggagagcgtttgaggctgatggtggtggagatagttttatctctgagcaaacattccatcttgctgtttccagcctagagatggtgaggggacttttccttggctctttcctggcctgctagcagcaccagcctaattaacctgacaagcggggcctccccagccatgcagccttgcactgccttcccacatccagctggatttggggatcagtgttgtttttaatcattcctaccaccttgtcccacaggcaggagtcctgccatcttcgaaggccagcccctaaacaggttccctgagtgttaggtcaaaataactttaaaaagacacgcagctatccacagcaatccttaatagttacttatctatttcagggtataacataagacacacctatcatttcagacctgcctaggacatgcctggagaaggtatttaagtaattttaaaagtgcatcaaaacaaggtcaggcgcggtggctcacgcttataatcccagcactttgggaggccgaagcaggcagatcacctaaggtcaggagttccagaccagcctggccaacatggcaaaaccccatctctactaaaaaaatacaaaaaaattagccaggcgtggtggcatgcgcctgtagtcccagctactcaggaggctgaggcaggagaattgcttgaacctgggaggcagaggttgcagtgagccgagatcacgccactgcactccagcctgggtgacagagcgagactctgtctcataaataaataaataaataaataaataaataaagtgcatcaaaacaagaaaaaccctgctaagggccagtctgctgggtggtggatgggtcagcagagctgggctgggagccgctatgcctccccatcaaggccaccaatagtcgggtgagccggcctctgtgccgtcatgggcaccctgtctcagctccggggacttggagctctgtgtttccgtggcctttttcacgatgaccaaacaaaggcgggtgttatggtgtccaggcccggtctccctaacgggcagtttctcagaagcaaagaccgacgagacagagctcctgctaccagagagccctaggccggctcattggaatagtcatttatttgttccttcattcgttcattcagcatgtccatgttgagcactgactggagcaggtcctgttctggggcctgggaaatgggggtggataagaccaaggtagcctcttctctaaggagctcagccggacctcagcctagagccctggtccccaggagctgaggacagaggtgggacccacaccccccccatgaggccacagagcctgcaggtgtccacaccttttgtttttgttttttgatttttgtttttcgttttttgttttttgagatggagtctcactctgtcacccaggctggagtacaatggtgtgatctcggctcactgcaagctctgcctctcgagttcaagcgattctcctgcctcagcctcctgagtagctgggattacagggcgtgcgccaccatgccaggctaatttttgtatttttagtggagacagggtttcaccatgttgatcaggctggtcttgaactcctgaactcgtgatctgcctgcctcggcctcccagagtgctgggattacaggcgtgagcccccgcacctggcccacaccctttctttaccttacacccctgccatctccagtatgcacctgtccgcacacacccacacacccctgaaggatttgacgtcatgagccaaaaacatttttgcaaaaggaaagcaactaagctcccagcgtgtctccccttatccattgggcttgtcccaaacacatgccggatggtgtaagtatcattccatcctaattaataacatttgggagccagcgatggcagtgtccagctgactgctcatagtggactccctggtgggggcgtggcatgggagcaaggccagccactgtcacccagtgggagcagaagtcccctccagggcccggcttctgagggaggacaggcaggagtccgccggaagtgggcctgagacgccgtatgcctgtggctttgtggctttgtgtggctagcgcctctcacacgtgggggctggtttcatcttccagccccacacaccttccccaagggcctcccgtacaccccggctgcctgggcgctgggctccagcctgcaggtggccgctgcactttaagtgtcacaatgggctgcacttcacatgaaagctgcattttggcaataagtccccaccaagcccactgagcctggccctgctgcatccacactatacagctgaggaaactgaggcccagctttccacttctgtgcctagggggtgggatccagctccgagggtcttcttcccactcctccaggaacctccgccctctggtgtcggtggagttgaggaggtgttggggtgtggaggggccaggtgactccctgtaagggcaaagtgatccagaggctgcccctaccgcaggtacaccaggctcaaaggccagctgtgaggctttccggggctggatctggtgggaaagtgcttatcacggagggcacccggggttcctggcgtgggaccccctctgacccaggctagggttcctggcgtgggacgccctctggcccaagctggggttcctggtgtggggccccctctgacccaagctggggttcctggcgtcggacgccctctggcccaagctggagttcctggtgtggggccccctctgacccaagctggggttcctggcgtcggacgccctctggcccaagctggggttcctggtgtggggccccctctggccaaggctggggttcctggtgtggggcctcctctggcctgggtgggcctggcctgagagctgcagcctcacctgggctccactgcctatggacatgagctgaagctgctcagccttccagggcctctgtgcgcaggcatcaccatccgcagcaggccaggacccgggcctgctgttctcagggtgtccttcagcggaggctccagcatggctgggttcaaacaggttgcagggtctgaagccactcaaggccgagcctgcctgcagtgagcgtcccactctgtccctgcaggagatcgtgctggtggtgttcttcgggacggagtacgtggtccgcctctggtccgccggctgccgcagcaagtacgtgggcctctgggggcggctgcgctttgcccggaagcccatttccatcatcggtgagtcatgcctgccctgtggaggtcacgcccaggtttccagaccaggaaggacccccacctcatgacccctaccagatggagtcccctaaggactggggaaccccaaggccagcagggggtgactgcccaggacccagcacaggagcattggcagccctcagcagcctctgcactcagacgctgatcatggtgttgggggtagggggttggtccctcacagattcccatgagcctcacagcccagcatagcttcatggtgggccagtcaccctcggcagcctgagaaccatggtccaggcctgaggccctgccctttctggccacttgcagggctcagcacagggcccagcctaggccgggggctccacatggccaggacagaggttgggtctctccgtttagatgctgcctgcctccctatccgaggtgtctccatgtccccggtcatcagggcgtgacccgtctgaccagcaagccccttccccagacgagagcagggtgtatgctcttccctggggccctggctgtggcgatcacgaaaagctccccctctcctgcactccacagacctcatcgtggtcgtggcctccatggtggtcctctgcgtgggctccaaggggcaggtgtttgccacgtcggccatcaggtgcgtctgtgccacaagctccccccgccatgccgccccaccccgagcacccctcctgagccgcgggtggtctcacgccccatccaccttgctcagatgcaaggtgccttggtgcccactgcccccgggggcactgagccatgtgctgggatgggtggagcagggtgggtgcaggcaagtgtggagggcacggctcaacccaagatgcctcaggcagccctaggctctggcccagcactagcgcctctgaacttccaggacttgggtggtaacctgaccatctgggcacacagcctgcccatctgcaaactggggtgacccaaggagccccccagaaggcagtctggggactgagggaatctggaggtacctggccgacccccagctcagccctgtgtgggcagattcagagcaggctctggggggctgcgcctgagagggagattcccaggcccctgtcgggatggacatatacccagcctccccacccagagtggacgcctgggaggggcaggggcagggacacccatgccatcggccagccctaggcccggcgtgaacagctgagcccagcctggctccctcagccccacaccatctccttcgcaggggcatccgcttcctgcagatcctgaggatgctacacgtcgaccgccagggaggcacctggaggctcctgggctccgtggtcttcatccaccgccaggtgggtggcccgggttaggggtgcggggcccaggttggggacaggacggagggagcagagcagcccacactaggacagcttgagatgcgctgaggccccgggggccggtgggtgcctgggcgcaggggtacctgaacggggcccaggatctcagagcaagcccaagcttgagcccagcctggatgctccaccccagcctggtgccagtgaccctggcctgccaggctgatggtgtgctcaccttcctctgagctgggggcaaatgaagacagaaagtcagaaatgaaaaacccaggcaaatcaaggacccggtcaaggcagggccaccagactccctcccgagggctgcactcagatgggttcaggctgcactggcccctggctctgtggggtgaggggacccttcctctccctgaggatctcctgggtcctggtccattcttggttctgtcacgtggcaggaaagagagctgggcaatcagtggagcccgcgccggcccagacagtgggcctagggcgaccccagggctgagcctcattctgggggtaacccccacccgccacttaccggagttgtgaggagtgggctatattgaagccggccctgtgcatgtgaaccgcgctggagcggcgtaggacgcccagtgatcgctgggactcgctgccttaggcgtctgcacaggaggctcccagcctgcggttcctggagcccgacactgtgtgttttctggcctaggagctgataaccaccctgtacatcggcttcctgggcctcatcttctcctcgtactttgtgtacctggctgagaaggacgcggtgaacgagtcaggccgcgtggagttcggcagctacgcagatgcgctgtggtggggggtggtaagtcggaaacttccaggcatggggacaggggcagctcaggctgaggagtgggcaggacatctgggcactggtgtcttgagacttcgggccttggcaggggcttctcacctgcacgctcacaggcctctgtccacaaacctgtgcttggagccgctggcacaggtccccacgctcagtgttgagtcctttggcatcaccatcttgaagttctgaatggtctcatccttgaacttgagatttgagagggaaatcggaggggtcactggagcgtgtgttgggggcttagcggtttcggctcccccatggctctgcctcccgccatcgtcctaggttgcccattccctgcctccaccgtggccctcaccctggcagggcccaaggagagcggcgtcagatgcatacctcgcgtgtctctgagggtccacacaggccctgtaagtgcccctgtccccaaggagccagacatgagacagcaaacaggaaagaccatgatggctcaagagaccccagcagagatcagagagcccccgtgtttccagtggatgctgggcctgcaagttctggagccgggcctgggcagtggcgacataggtgcagctgggcctagggaagcagggacccggcctgtgggcccagaggctgcccctggctgtgaaggtgggttccggccacctagagcagcccgggagccttggggaagccggtgtgcagcaggcagatcccgcactggaacaccgagccacccaaagctcagagaggctgtgcgggaggggtggggcagggtgtcttgggccgtgtctgtgggggcttccttgagggactcaggcttgcacgtgggagagggagatgttccgatgaggatgcagctgcaggaatcagggtgcgccctccgagctgcaggctccccaagtcccaagtcactggcctgtgggcccagcagcagtttctcatggctcagaggacgctggctgaggcatttttagggggcaggcctagcttgccagtgtccctctgggagctggtggctgccttcaaatcctccagtgaaagtcggcgtttatatatgcatggagctcaagggctgcttctagggggaacacgtgggtaccccgaggggagtagctggctggaggccagagtgcagggagggaatgactccatcccatctccccccacagctgcagggccaggtgggccgtccacaggccactaaggcccagggtggcaccatcacaccttggggagtggccctgggtggggaccgagaagcccaagtgccgaggtgacagggtgacccctactctgccgccacaagcctgcccccgcgtctgcccttgtctaccgacctccgggctcactcagtccgataacaggttagatggaatcgtggtagcaacaggggctgggggctggggaggaggccgtcgaagcccacacagggtgggagccaaggcctgggggccgcacgggggctggaggtgggggcgggcagggcagccgtgggaaacacgtggtggtgccaggacccagtccgtctgccccgagtcctccttccagaaaggaccggacttgctggctctcgggaccccccaccaccatcagagcatatctgggtggggtgagaagcctcccggtggctccccaggcaggcacgtgtccctgcgattgctgtgcctcctccctccccctcaaccgccgcttcccccatgaggccagacactcagcagtggctcctgacgtaggccaagtcagcaggttttctggaagcttccaaagtgctgcaatgctcagggatggcaggggcatgctgacacagctcctgggttggggcaggccccactttcggcctcttcccgccttcctgggggcctgtgtccccgaaggccccagtgtggcaggcctgagcaggtttgggcagcagggcccagcccccctgcgggagcctgcctgcagtgagtgtggatgggtagggcgtgctcgggggatggacggcccagagccaggagagttcccgggaggctggtggcaaggtgggcagtgaggagctggcggtgcagcaaaagccagtgggtactggccccggcacggctgataagcagtgcccagccttcgctgctgccctgcctgccttcccagccgcccactggagctgtgggcagcggacgctactccccagccccccagcccgcagcagagcggcactcccactcccacacctgtgcaaacatccgcccgctggccgggaacacggcccctttgtgcccggcttggcatcagtgccccggcccacaccgtcagctgcagcccgagcctcggccatcgcgcgccctggcctggccattgttcccgccaggccccgcgcccctggtcgccctgggccccccaccgcccagggctgtggggcaaacagctcccattcagctgccctgcagctgtctggggggagcggcccctgaggcctgagttatgggctgtgttcctggcatttctcggacaaacagaacttgagaaacgcaagaaggggcagcagcccagatgggggcttttaagccagttttgccaatttgcaactgcgccctgagcagttgttttctttcagctcctttgtcctgcttccttcaccccaccggggagtgaagtacgccctcgccggccaggcagccagggctgctccatgtctgtccgtccgtcggggctgccacaggcccttactgggtgggaggtggcttcctggaggccaggccattctgatcatcatgctgcatctgccccagaccttgcctggactctgtggactcctcacccctcagacacaccctgagagggtgctggagctgccacaacaaagtccgcgaactgctgggcccagagcaacagaaactcatgggctctagaggccagagcccgaagcgaggtgtgcacagggcctgcccctccgaaagctcagggagaaatttcctctcctctccccgtggctggagactccaggcgtgcccggtgtgcggccgcctctttcctctgtgtcaggccctgtctctcatgaggacacttgctgttggctttagggtccacccaggtgatccaggaggagctcatcttgattgaatcttcaaagagcctatttccaaatatcgcattctgtgggtccaggtgaatatgaattaggggggatgcagtccagcctaggacagtgggtggcccaggtggacttcctgggaaggtccctccccttgccggccaccagtttccacagctgtccagcgaaggcgccggctcagtggttgagtgtcccctcctgtccccttcgccggggtggggatacgcaacttggatgtgagaactctcgaatcccctgagtgtggcgcctgccctggctgccaaggcgtttggggagaatttaagacttttctttgcccttggaacaaaatgcgtttgtttgtgttaaagtttgagtggagggagaagcagtttttgcaaacacgggcttctctgttcagcgcccgggggtctctacaaacaggaggctgccgggctgtgtttgcccctctgcacctaaatttagaattgaaagtaaagaagctggaaccccattcctacatttcagccgccttttgaagtcgagtctgactgcctgctgttcactctctcctcacctggagcctccagaaattcccgcctccctggcaacgctgcaccctggcggggcaaggccagaaggggctgggggctggtgcaggggtgtgcgtgagggcagggcctcccagacagtcacaggccagccctgttggcactgcccagcgggaggggtggtgtcaggaagagctggggaagccaaggcgccgtgggccgaggggcggcaggacctggccacccaccgagcccctgggtcagcgttcttcctcctcctggagttccgtgcaaaggggaacgagttcagctgccctactgagtgggcctggggacagaggcagagtacgcacctgctgtgtgcctcagtttctccatctgcacatgggagacagcagtccgtctcccagggccaatgcagggcccgctgcaagggctgctgaggactgtaatcccagaggctgcaaccgatccctctgctgcggagactttccctggaccgaaagggcctcctggtgaggctgggtctccgtttgtggactcactgttgaggcgtgtggtttgcggtcctgctgtgtgccaggcaccggcaggggttcgggcagccctgtcttgctctctctgtcacagtcaggagcgagaagcatggtgtgagctggggctggcctgtggtggttcgcaggtggccatgggaagcaccgccggagtgtccctgcaggactgtttcggcccaggagcagggaggcctccttgaggaagtgacagctgagctgagacctcaagacacagtcacctgggccaccttccggcagggcgctgagcctggctgtacctcggggaagacgcggcctggggcctgggtgccatgggggtgttgacggtttcaccaccagcccgtgtgtggggctccgggcttcgtgagtgaggagaggactccatgtgacggggaggcctggccctcgtgaattggtgttcgtttatttactttctcctgctgaaaggaagcaggtttattttggggtgtgtgtctgcttttgcttttaccctgagagtttgccagcctgctggcttgttcccccacccccacctggtggcgtcagcccctttatggctgttcctgagagacaggccggagtctccagggcggccccacgggggctgggcgtccccttggaatgtgagtgcctggcctgttagagccccaggaccgctggccccacccttctctgtcccagagacagtcctgccccccacccaggggcctccctctgtccacggctccccctttcccaggccacccccctaggcccctttcctccaccttcattggccctgccctctgtagtgtcacccaggtcagtggggccctgtcctgccctgtcctgaggagtgcatgtctctgagccctgcatggggggagcccaccagctagcagaggcccagaaggctctagacaggctctagactgggtctctaagtctgcaaggggcaccaaagcactttacaaattccaggagtgagtgacaggctggccacgtgccaagccctcacccagcaggcagcccgtgagaagtgtgttgtgatcatgcaccttcccgagagggggaaactgaggtacagaacatgctggggctttgcctgaggccagacggacagggtgagaactgccccccacactcagagccacggtgccagcccagccttgccagcagggcagccacaggacttccaggcaaggtgacggtgccaggtggggcccgaggccctcactcatagggcattgtcccacatcccctggaaccactgagacaggcatcgtgccacgagaggggacacctgcctggacctctgtgtgctcagcctactgggggcactgaggccgagggcccagctctgcgagatcctgcatgggcttccttccaagccctggagaggggagcaggcctgggagggcgcccttggcccagagcctccatgaagagccaggggcctcctcatggctggggccccagcacagtgacctgggaatggctgtggccgcatgggatgtcccggagcccctgccgccctccttggagctgtggggctgagcttgggtgctgcgctctcctgactccatccttaggtgcctcctcacgggcaggctgggctctcgaggctgggcaaggtcggggcctgcaatggctgaagcagcctcttagcccatctctgccttcggggtggccacagcggggaacgtgggtcctgcaggccttggtccagctgtctgcctggccactttctaatggggagccctcagcacagtgactgcccagcctcagtttcctccttcgtagatgatcttgacctgagagtgccagctggggtgtgacacctctgggctaccccctcctcccgctcttgaccaccccttcctctggacagacgaccaccacatctccagccaggaccaccccttccttctgggcaaatgactaccacgtttccagccggggccagtgagctctgggagccagggcttggcatgcggctggagctcaggtttctgggctggcctctgtcctcccctcgaggccagccttgaggaggctacttctgaaaggagggaatagaatcccagtgtttctcagggaggaacatggggggactagaaggctccccatgcctcccgccccttcacatgggagtgaaggcacaggccagcaggagggcgggggaaacacactgaccagtggggtgtgcgttccccgctcgcccccacagttcctgccatgggcgtgactttgtgtgcctcatatggctggtgccctggcaaggagccacggcccaggagacagacatgtggatctgcattccaggtggtgggccatcagggactaatccccagcatggtgaccataaaacagcccattcctgagctgcctgtgtctgaatgcaggaaaaacaaacaggtctgcagggaggggccgtttccttgttaacttgaggatgagggtctggggccgggtctgggcagacaggcagaccaggcgaaggtggggtcctggagctgcgtcctgctgtatgtgtgctctccacggtgggcagacacccaggggcacttctggggctggcctttctctccctctcggggcacccctgccttctactgaccacccagccagccagcaggagcccacgtgcacccagctcagccccaggaggtgacacccccaccctcagcagctctcgtctgtttgggggcaggtttggaaggtggtctcgggtgtccttacgcgagcaggtggctacctcacctgctcacctgaccccaactccactctgacttccaggccagccccactccattccaccttcatcatgcagtttctgtattagatttttaaataatcaaaatatggtattttcatttaaaaagtaatgcttttaaaatatattaaaataatttaatgttgttattagaacaatgtttaatatgccagcccgtgccatttgtcttgatgcctgggtttgctggcgccccttacgcttggcacgcaaggcaggagctccccactggcctcccccaactgcttgccgcccagcccccctcaggccaattcctgcctctcagcctatcttgggtttgtcctcggctgcctcgggaggcagccgtgcccaggcctcttggtctcagggccccttggtgcccctgacggagaagcctggctcgtgggcattgtgccatcactatttaatacagtggaggcatgtaaaaacaattccatattaatttattaaaataatagacccattacattttcataatgtcatgaaaaatttctatattttccaaaacaaatattatcgaaagaaaaatatgcatttttgcaaatctccagaaagcctggctccccagaggacggggatccccacgcctgtcccggaactgtctgtgaagagcaacgtcccactgcttacgcttgggtgggagcaggagtgcctgttagtgccccccagccacagagagtgctgccgtccctgagcccagccccagcagatcatcagcacacatttgcctggggaacacagacagccctgtcctggacgcagcccttcaaccctgcttctcatacctgacccccaccttgggcgctggtctgccacaccccaccacccctgctttcttcagcctgaccttgtcctcccggacccagtgctaggaggatgtccaggcggggtgggacttgggcctgcgctgggctgctcctcaagtctcgggctgcacgtgccagccaggcagacggtgctgagaggggcccttctgcagagcggaggcagagcccggagtggaggggtgagcactgcctcagggcattggcaggggctgcgccagcccaggcacaggtctgagggatgaataggaggttgctggatgaacaagtaggaatcagcatgttcatactgaaggggtgagtgtccccccaaaaaatctggattagacagactctggagccctcttgctccaggttgcaggggccctccgagctcaaggccaggataggccagggtccctgccctgcccaggcccttctaggcccgtttctgggccacctgtgtgtgctttcttggacttgctgtagacttggtaaacagtggatgtgctgggaccctgggctgagcccctttgggctgagagctcaccaggtggaagtcactccccagggcaggactggcacagggtctccgatgccccgcccactttgcagccctgtgtctgcctctgcaactccccaccccagtgcacctgggccctctggggaaggtagcggcagcccagcctgtgcatgtgggtgcaggccctctggggaggacaccctgcagacgaggggctccggttcccccagggcccccctctctgccagccactgtcagcctcacccatggcctggcttcaccctgcagggacctggctgcgctccgtgtgcctgcgctgtgcgttcaaggtgtctgcacctgaatgtgccctgagagtgtcaggctcggacatggggaccagctcccttttcacatgaccttgtcatctgtgtgacgcacgtgcgtgtgccgggtcgtgtgtttccgtgtgtgtgtgcacaagcacagacacgtgcacgtgtggagcatcccatctctgcatggggcacgcttgtgagtgtgcacccacatacacagagccgggtggtccactgaaagggcctggcagtaaacagcttcctgtgcacattgtgtgtgtggcaggggcatgggggcatgtgtgtgtctcttaaggacagtggcgctgcagggagagctccgtgtgcagctgtgggaggtagcctgcaagcagcctctgcagaagcatcctggccataagcgaacgtgcggtcagggcactagtggggcaggggcctgggtggcggccagggctcagcagaggcctgtcccgccctgtggcctggcggcggtggctggcgttcatcactgttcgttaacgtgctcatcggtacagcctggtttcccgcaatgtggccgcttctgctacctgagcctccgagcctcctgctgtggcagttctgggcagtcgcgtgagccgtgtgcacctgcctctctgtccgcgtgtgcgcctgtgcacccctgcccgggggtggccatggggcttctccccaccctccctcctcctcagtggctggtggaaaccacagggtggcccagggaccctggtctcgtgggggctcaggtgggccggggtttgttcttgccttccatcagagtgtgttaaacaggcctcaggccttcctgccatcagcactgggcccatagggctgggaatccagtgggggtctccatgtggttcccagctggggcattcctgggcctgcaagcggtggccgtcacttgaccttgaccagaagccccaagccggtaaatgctgtgctgtcctgagtgtggtgcccagagcagggctgcaaagacctcccgcagccacagccatggtctgggccaccatgcctgctgtccagatgagcccaggcaggagcctgtgtgtccacagggtgagctgtgcctgagggccactctgggtctccttgttgggctcagcgccagctcctgaagaacccagcaggcagcctgcacggaccaggcccagccagggtaggctcctacgtcctgcagaatgacatttccaggctcagactggaatccccaggaagcaaacctcagatgccagcgcgggggaaagggtggggggagccttctattgtcccaccacacgtcctggacggatggctctcccaccaagaagaaggcttgagctgcatcttgtactctcagaaaagaggaaaataaaacatctggtgccctggagtggcgtcaggaagcagcgcgtcatcccagcccctgctctttgttgacgaccagcctcagtgggagctcccggtctcctgggggccggcgcacagcaacgtcggtggcccaggggcccagcctcctggggacaggcaggcagatgaggcagccggtgtggggcgagctcccaggcccacgttcccagccagcaggcctggcccttcgtgggtgctgggctccttacatgtgctggtgggacataccttgtgtgtgacgccgagagcctgggagacatgtgccatcccgcggctctgttcctggtgctttcgccgagtcacacggggtcgtcctggtggtcagggtctcttgccggcctctccgctcatcagagtggtgggtttgggttaggcagttggccctcccgaggctccagtcccatccgtggctgaccactgtccctctccctgcaggtcacagtcaccaccatcggctatggggacaaggtgccccagacgtgggtcgggaagaccatcgcctcctgcttctctgtctttgccatctccttctttgcgctcccagcggtaggtgccccgtgggtgcgttttccctggctccttggacagctggggtcctggggtggctgcacgcccctccctgtgagcagacccacttacgttcagaaccaagagggtgcttcccttctagaaggtgctatactccagagccccacctgccctccctggggccctggatgcagacttcccgtttgcagtccccactggggtccttgcaggcagtgtgggaggcagcctggagtggctgtgcatgggcgcagtgtggggcaggcctgctcactcagccctgggtgggtgggcaatgctgctaccacgccccatggaggcagaatcttgtgcctggagagggcacttccacgctgtggctgggggggttttgttccatgtcctttccagaaaccacagattgtaaggtgatgtgtctagttcacaatgcctgtatgtgggtgtgtgtgtgtgtgttatgtgcgtatgtgcataatatgtgtttgtgttgtgtgtgtataattttatgttacctgtatactatgggtatgtgtatatgtatcacatgggtgtgtatgtactgtatgtgtgcgtgcatactgtgtatacatattgtatgtgcatatgttgtatttagtatgtgtgctgtgttgtgtgcacatgtatgcattatacatgtatatcagtatgtttgcatatgtgtatttatgtatctgtgtcacaggtatgtatcctatacatctatgtgcgtatatgtgtgtgcacatgacatgtagacatgtgttagtatgtgcttgtgttagtgtttgtgtgttagtgtgggttagtgtatgttttagtgtatgttagtgtgtttgtgtgttagtgtgtgggtttgtgtttgtgtttctgtgttagtgtgtgtgttagtgtgcgttagtttgtgtttgtgtgtgtatgttagtgtatgttagtgttagtgtgtgttagtatgtgggttagtgtgtgtgtttgtgtgttagtgtgtgtgttagtatgtgtttgtgttagtgtgtatttgtgtgtgttagtgtttgtgtgtgtttgtgggttagtgtgtgttagtgtgggttactgtgtgttagtgtttgtgtgttagtgtgtttttgtgtgtgttagtgtgtgggttagtgtttgtgtgtgtgtcagtgtgtgtgtgttagtgtgcatatctattgtgtgtgtgtgtgcatcacacatgcacgtgcaccacgtgatctcctctgtagacacggagttccctagcttcagggtgggtcctttgcatcccatcaaccgtccttgggcgaggcagcagcagggtcctcctcagctgaggactgccttctcacttgcgaccccaatcccagtgcccagtatgaccccttcctgggcacatacagatggaccagcccacctggcccccagaatggtccctgggaatgggttagagcggctgcagccctgccccatgggactgggccccttgctggataagacctggggtataagttctgccccccatgctggcccaggacaggcaggctgggcccgaggtgggacttgggggggcttccagcactgaccatacctggccttcccacaacggtgaccggtaaccacgtcctgaggctgcacccagctggcagtggcctgtgtggacgggagcctcctgtccattccttcccaggggattcttggctcggggtttgccctgaaggtgcagcagaagcagaggcagaagcacttcaaccggcagatcccggcggcagcctcactcattcaggtgcggtgcctgcaaggccctggtcactgtcattttggtcactgttattgttgcatccagccctcacggccacctgtcagaaccatcattggcccctgcatcagcttggctggcctgtggggcatactctgcttgtggaagccttggctgctgtggtgatggggtgagcacggggcattggagcctgtcttcctccaaagctgctcccatcaagggccatgccctgtgggctggagaggaggcacggccgtggccatgccaggagtggacgtggttggctctgaggctcccttgtgctcccattctccctcccactgcacaacaacctgagggctgagtctgggagtggggtggccaggtgattgtccccaagggaggtaggacccagctgtgcagttggtgccttctggagggcctggcatccctcagggctcgggaggccctggtgcctggaggtgaggactggcgatggatggcatgggcctccctctgggctcacaaggccagtgggctgggaaaggcagagccctggagcaacaggggcaggaaggttctggaggcaggtggggaggcaggcagtaccaagctctgggatgctgggctctggctctgtcactccaggctctccaggacccaccagagaatgggactgctctgttaacgtaagcaaggacttggcacaggagtcacttgagaattgcgtccctgtgggtctctcttgttggccactgcagggccagggctgccctgaggaacagccgctgaggtgcccagagggtgggcgttgccgggttgaatgacaagtgcccactggggatagggcctccgcccagtgcagtggctgggagcacagtgtcagttcctctgggcacactgggcctgatgtcccccaggaaggcccaggacctgggcagcccccgctggctggcgtcccccctgcagtcctcgtgagctcgctgccccaggcaaggcccaggctgtcaggggccagtcgcagtcctcctgcactcctggctcagccatcgggggggctgtgtgctcccacccttagcctggttttatggcttcacagtttctccttcctgggagaccataaatcaggcccgtaaacccgccttggtcccagcatgagcatgctggccgcccacgcctggcaggggaccacattggattcctggtcccactccctgggaaccacaggtcctttgaaaggggttccctcggaagctgcacacactgtgggaggactggagtaggggccccaggtggcaggtgtgcacaggagcagggcaggggtcatggggtttgccagggttgggggaccacgtggagtgctcagcctgtgtgtgtaacactcgggccttggaaggctgggcttgtgccctcgcctgcctgtccctgggtgctggatgggagtgagggctgcaggtgcccctcgccagctgctgtgtctacctggggctgtcacccaggagcccatcagtgtgggggaacattctccactcggccctctctcaggctcatgtggccagtgatgacaaggccaccaggacatgtcctcatacaaggccctgggagcccctcctgcccatctggacgctgcacaactgctcccccgccgggtcccctgccgatagtgtcccctcctcccacccttcccttgtggtgctgccatggggtctctctgaaatgctggcttcagagctgcacccatgtgccatcagaggctcccccaactgcaaggtggtataggcctctgggagagacctcacctcctgccagccctagggatcctgcctctccctgccccctgctcagcacctgcaggtcctgggcgacccctctttctcagcccttcctcactgtgtggccactggttgcccatttccgcattggtctcctatgcacgctgtgtaccctggcacctggggatgatgtgcgacctgcccacctttgcaagtctctcctttggctcaaggctggctcagggctggtaaagacctctgtggtgtcccagctgtgggtaacaattagcccatgaggcagtgagctgcctggtgcagcaagggaccaagccaggctgcctgggcagagggtctgggagctgggaccatgtcaagcctgtgactctgaggtcccagaccctgccacccagaggggaggggccaggcctggggaacagggagggggagctgtagcttccataagggcccccgccgggtggctcagcaggtgacagcctgtccccctgcccgacctcagaccgcatggaggtgctatgctgccgagaaccccgactcctccacctggaagatctacatccggaaggccccccggagccacactctgctgtcacccagccccaaacccaagaagtctgtggtggtgagtagcccacctgccaccagggcagggccttcttgctagcaggtggggaggccgtgggggccgcagcacgaggctgggatctcaccatgcatttggcttggtacagcctgtgtcagggagtcagcatcgttcgggacactgggccatacacccgatgctaggttcctgccatcccaatgtcccccgacttgggggtatgtaggaccggtcattccagggccagggcatgagagctccagagatagagctctgggagcaggacgggctggaaagaaggctcttcagagggcctcagggttgggctttccacaccgggcgcagtgggtggtgagcagtgggcagggggccgcgcgcagtgggtggtgggaggggagcagcaggggagggaggtgaggcaggggtgcagcgaagggggtctggaggtcacagggcagtggagtttggcaggcgctgggcagaagtcttgtgacatggctggggtcataaggggttggggctgacgctggcatggttccccttcctggcccgtgcccaccccctgtggagagacctggccttcccagtttccagctgccggtggagcctccgtgcctactgttccctgtgctggaatgttcccccagatttccacacagcctgctccctcacttcaggcgccctcttcatgccctgctggcccccagcctgttcccccgatatgcattctcccctactggtcacagcccctgttaccacctccactggcaccatcttgtacgtttatctgcttcctgctgtcctgttagcgaggccgtgagctcacagggcagcacctgggccaagccccccacgtgacccccagcagccctgccctgtctctgtgtgaagacactggagctggccccaggcctcaggtccctgtccgggtgtatgtggcgggggctgggctcggggcggctgcacaggcactctggggccggcgtagggcctggcagacgatgtccaggaaccgctaatctgttgtcttgttttttttaggtaaagaaaaaaaagttcaagctggacaaagacaatggggtgactcctggagagaagatgctcacagtcccccatatcacgtgcgaccccccagaagagcggcggctggaccacttctctgtcgacggctatgacagttctggtgagaacccctcaggcagttgggggccgcggggccgggaaggtcactgccttttttgggagcccgagcaagccagtgagtttctcccttgggctgtggtctctgacaacgaggtatgaacagacagagggtggagcttctagaaacttctgtaaaccttccaggtgccttcccctcagagtcttcccaaggaggagctggccacgccttctgttgcgagaggaagcctgggcaggtgatggggtgggtcggctccatccggctgtactgagggaagggtgtgttcctgattccagctgcctggcttcctcccagccgagcccacgggctctggttggaaagtggctagggtgacctctgggcctactggcagggacgccagagggaaggggtttggggatggggccctggaggagcagcaccaggcccgggtaaaacgtggggggcctgacgggacaggcccttctcatgcagcccaggggccccgagtctgtgcgtgatggtgtggctcggatctgcgtccctcctctcacccctgcagcgggggctgggatgaagctaccttctgcgggacctgacgattggatggcagacctgtctagggtttagatgtcctccatccctggtgaggggttttacccacgctaactcgtaagcgtggctctttgacagatgtggagagcgaggccctagaggctgggctcgtgtgctccagccacacggcgggaatacagcagtgcccggttgtggctcccacgagtgaggccctggaggctgggcccatgtgcttcagccacacggcaggaacacagcagtgtctggttgtggcccccccatgcctcccgccaacttctgctgttcccagaagtgcagctggctgagcacagacacagcaggtgacctgtggtgatgccagggcatcagcgcttggcctccccacactgctccagggcagacctggcctcctggctgcatcaggaggcacacgtgatgcatccgtcatctcgggaccagttttgagacaaacatcctatagggcaggaccgtgaactgggtagctctacagagtgtgaggggctggagacctcctgcccactggccacggatgccacggatgcccttgagagttaggagaggtggaagggaccccacttctccctgggagctccaacttctcttgcatgtgacttcagtgcccacttctggggactgtgatcccaaactgccaaattctctagcagctctcttaaaaccaaatgtgaaggattctggctttttctgtcctctgagcccagcgtggggtatttgagatagctgtgctgccaccaggacaggggcgtgcaccttgtcttcccaggagaaaacacagcaaagcctgtttgctccctagtacctcgtgcaaaggtgccatctgtggccctgctcgctgcttcctctgaggcagacatagtagtgactgtgttctgatacaaagatggcacttgcccgatgctgcactgcagcaccaatgcagaggccctggcaaatgttcgcagaagcccccgtcccagggcgtggtcccccttggaggaaaagggcacctgttttgaaaacacttggttatcatggtgccagaaagcactagtttaggccccacatgaaacagtggccttgccctcccagcatgggagagccctcatcttccaggtggtggggggagcacagcatttgaagcccactcccctttgaccacttgctgttgtccagacagacatcacgcacgtgggccttgcattggttcctgcttactttgtctctgctgacccggtttctgctccttgaagtctcagcccccttcttccatgattccaaggcatgtccctctaaggaggcttgaccccaccctggagggcctgctccccactctctgccttccatgccccatgggagggctccatgtggcccagtcccttggaggctggaccccactgttccggactctgggctgttggaagccaggccctgcctcagttgtgccaagtggccagggttctatgcctggcagaggaggtgtgggaggccaagcgctgatgccctggcatcaccacaggtcacctgctgtgtatgtgctcagccatccaagtaatatgatccattcccttctcagcagccgtccctttaccctttggtcatttctgcatccatctctccctctcggacctcttcccagtgcctgggactaacccgaatgtctcagcttaccagcagttgtaaggatgctgtcacatcttatgcatggcagagaggggacaaacccacagtgttcgcaaccctttgtgctcgcaggcaccagcccagcccgccaagctccagttcattcaggatggctcacctgcatccccacctccttggcaggaggctgggtggtgttccctgccccttggggctttcctgggcatcccatgtggaagtcagcaggcaagaccaagtccaggctcccgctccactgggcaccaggctccccaggacttagatgccatcaggattgggctgggacccgaccacatctcagtgagcccccgggacgtgctcccgcctgcccgctggagccggcacaaagggcgattgtgccaaccaatgcccagtgcccccacagctccggattcagggctgagaccattgtctccatgcaaatgggggctttctgcgcatgctaacgggcaggtgggcgtggccgggggctggggacccagcctgtgtgcggcctggagaagcatcgcttgctgcttgctgaatgcggggcagcccgaatcgatgccgtccattcagcctggttagtgttatgaagtcattagtgctgtctgcggaatgttaatgaggggcaagtgcggagaaagtcaggcgccttttgtggaatgctcctccacggagaagatttctctttcctgctggagtttgttctttcctaacttgataagtcagcccaggctggaaccaccagctttctggagcctgagctgttggcctggcccccagggacagagcgacccctgataatccggagtcccctttgcccaggaggctcttggagagccctggcttggggagaaggagatgctgatcccagggcagatgccactcctggggaagccccacagccccactcccgcaaggcgggtacgaacagccacactgagtcccccgcaaagtcaaacccaggcctcgaccttgtctggctgtgctttctgttgtgtgaacctgcaggttaggcagaagtccccttgaccctgcctcagggctgctacctgtctgcgccatccacctgcacacaagccccttcagctcgtgctctagctggtgctgtgcggtgttggccccatttatagatggagaaacggaaggccagggccatgtggggaactcctgaggacacctgtgtgtcctgacacctcactgagcctgtcgagaggcacaggcaggtatggcagtggcagacctcaggggagggaggctgggaaggtagaaggtcccccatggtagcatcagaacacagactaacctgcagcaaaaatgggctgtgtggtccctgtagagcagcctcactgaggggaggcaccagccctcatcccacgcagcagggcccgctgctgctccctcaaccttctgacctgggtggggagggaggggaatgtcagcagccacccagcccgagagccagagcacagcaggggctggccagcctagccctagagtctttgcagtgaagcgtcacagactcctcatgaaggatgcatggggacccaaccgcatgccacttggcttggcagtgtcaaagggactggggacctgcgaggatgcggtggccattgtctgtgcccagcctggggagcctgacactcacagcccggctgctgctgccttgggcgtcctgaagatcctctgtatgcttgtggggtgggggcagacacacaggcagcctcctgcccagagggtccaagcgggcatggccatccacatctgcaggtcagaagaggcctgggctggagccgcatactggccatgctgcctcgctgtccctgcctcagagccactgtattcactctgcctggaactgtctttcctggatcccaggagtcctgaaggagccgcctccatcctgagctgcctaccctgcccctcctccactccagttgtctccacagccaggtcaccattgaccaggttgtccagtcccctcctcataggggagtggccctttgtctttcaccactgacccttcccaagctggtaccatgcctaacccatggtgggtacacgataaaaatgcagggctgtgccaccagggttttgtcttgacaaagggactggaggcaggttgtcagagtagggctggccggaggtggcctcctgaatgcccctaggaggccagaggagacttccccaaattcactggtcctggaggccgcctcagaggccttttgctgctcagagaacactgggctggaaggtcgtggtctgtgacgtaggatcggggaggccacctcagaggccttttgctgctcagagaacactgggctgtaaggtcgtggtctgtgacgtaggatcgggcagcacgcacctttccacctggcctggaggtgattctgaagggcttctggggaggcgtcttcaaagctgtgcctgtgtgtgtcaccacgtgtttgccaggtgacctgggactattgtgtggtttcccgtttgtgaagtggggcagcgtgctggaggagcatgcatcacatacccagaggtccccagtgtggtctggggactcatcgttcacactcgtgtgtgtgctttctggaggcatgcgtcatggaacagcctcacctctcacttctgcacttgtgagcctggttctcacagggtcaggctgtagcctcctcctgctcccggctccgcgtcctcagcccaacacaccaagcctggcctttcatgcactcctccattcaaagccgtgtgttctgattgtgcacttttggtggctgccacaggattaaatcctgaatgctttgccagttgagatcaaaagtcaccccaactcctctgaaacctcactgggacctcaaggtgctccagatcctactgcctcctgccgtttcctgggcctttgttgcccagtattttggttttgtcttttaaacaatcctctttttgttgatgctgcatacattgagatatttactcacagacttgcagttttctgtctcaccatttggatttaatttcctttttcctgaagtctgtgtttctttcagtgaaggtaaactctcagtttcagtttgtctgaaatatttttactttgcctttattcttggatgatggtttcgttgggagaaagtaacaggttaatatgtacattttgtctgaagactctggagctgtaacactgcagtctcctggcttctgtgggtcatcaggctaattgattttcctttgtaagtgaccctccctacctctagtgacttcagaaaccttccttttgactttagtgttcagaggtttcaatgtactgtaccaaggtggtgcattatttttatttatcatgcctacactttgttgtgattcctgaatctgagggtttatgtctttcatcaaccgtggaaagtcagtaccattatgttgtagaatattgcctcccctaatgcttctgatcttttccagaaacttctatttgaccatctcattgtcttcctcagctgtctcatagattttctatctctgtctccctctgcttcattcacagaattttctatgcagtttctaactcttgagatgtttctgttccactgctttatctacccactgagactttcagttatatattttttccttccctataaatccttgtatgggggtttaatttgcttgattttagcatcttgtacctttctcatattttaaactacaacttttaatctttaggtcatttgaacatgcatattttgtaccctctatcctgtcatttcatcatctgcagttcttggagagtctaattctgttcactgtagttttttctgactcttgctcatgatggctcatttcattgtgggtttgcaatttagatcatgagtttgtgtggtggatgtttttgtttgtggggttcctatgtatcctgtataaggtacatgcctctggagaagctgcacttttgcttgtacagggtgacccagtgaaccaatccaggaccttcatgatccatgttttagatatgggatcttctagacaacctatgcagtgtaaacagaaaccccaatctcctgtgagagcaagtctaagtaacatatattgagaagagagttttattttataaaataaaactgtctttatttgcagaagacatggttatctatgtagaaaatctgatgaacatgcaagatgaccactatgactaatatatgagtttagtaaggtggcagatacaagattaatatgcaaaaatcaattccattcatatattcttgcagcaaataaccagaaattgagatttttaaaatacaggcgtgtctcattcttattgactgcactttgctgataatgcattttttacaaattgaaggtttgtggcaaccttgctcaagttgaagccagtactcacgtaccatttcaacaatcctagggcccttaagaattatgctaaatctactctgcttatgctctataatgaagcaacaaagcccgatgacagtacatctgttgacaacatggtttactgaatatgttgagcccattttcgagacctattgctcagacaaaaagatccctctcaaaatgttactgctcattgacagtgcacctggtcatccaagacctctgatggagatgtacaagattagtgttgttcttatggctgctaacacaacatccattctgcagcccataatcaaggagtaatgccaactttgaagtcttattatttaagaaatacattttataaggctatagcggccatagatagcgattgctttgatgaatctgggcaaagtaaattgaaaacattttagaaaataatcaccattctagatgaaattaagaacattagtgattcatggaagaacgtcaaaatatcagcattaacaggaattgggaaaaagttgattccaaccctcatggatgactgaggggttgaagatttcagtggaggaagtaactactgatgttgtgaaaactgcaagagaactagaattagaagtggagcctgaagatgtggctgaaatatcattagttattagagaaatgcaaataaaaaacacaatgaaataccacggcccaattattatattatataaaatgagggagatggatgataccaagtgttggtaaagatgtgtcggaggtggaactctcatatgctcccggtgagaatgcaaagtccaaagcgatgcaaccatttgggaaacagttcagcagtttcttgatgtgttaaatacatacctaccatattctacagcgattctattcctaggtatttatccaggagaaataagatcatatgcatgccaccatttgtacatggaatattcatagcagctttataaaaactggaaaccccaaactggaagcaacccaaatacccatcaacatttgaatagatttttttcaaagttgtagtatattcctaaaatggaatactacttagaaatacaaaggaatgaaccactgatatgcctacaatatggatacattgcaacataattatggtgagtgaaagaagccagacaaaaaaaaaaagagtacatggtatcttatttatgtaaaaatctagaaaatgaccactaatatagagtgacaaacaagtcagtggttatcagtggttacctggggatcaggggtagtagtaggagggaaaaggacaaaagggcacaaaaaaacttttggggcagtggatatgttcattatcataatcatggcgatggtttcatcatgtgtcaaaagttaccaaattgcacactttaaacataagcaagttatgtcaattatatctcaataaaactgtttataatatataatgtaaatatataatatatattttgcatagcaaaaaaacatactgaaaataattttttattgataacctaaagaaaccagttgccactcacctataggcatggggctaatttaattgctatataaaaacgctcttgtaaatcaagatagaagttaaaggatattaaaacagttcacagaaaaggaaataccaataattcttaagaatgaaaatatgctggatgacttcaattatgacaagagaaatgcaaactaaagcaatggggtttttgaaacttatctgattattaaatatcaaagagtttgataacactctatgggtatgtgtacatggaaactctcagtctcagtcattgatgttagaaaaataaattgatacaaacctctgtggagataaataaggcaatttcaatcaaaattaaagatgcatatgcctttgaatcattctagaaatttattctacacatatcttacacatttgcaaaataatccatcatcaggatattgatttctgcaattgttaaatagcaaaaaattgcaaaccaccgacatacccatcagtggaggtctgcttcaagtatcatatctccgttaaacagccatcaaaactgtgaagcttcactctcatcactgatgcaggacatccctgatatctgatcctagaaataacagtacatctttcagaagagtatgaaatctgccatcatgtgggggcaaatacaatggtttacaaaacaaagttttatctaccttccttgttctgtgtcttggaactgtttgaagaacattgggattatcttttctgtagaggttaaatagaattgagttgtaaaaccatctgggcctgatacatgttttataggatatctttagtaatttctttttagtctgttttatgatatgttgttctaaattagtttattgcatcttttggagtaatttattcattgctatttaatttcctcaagcatttcaattgtgttgccacttggtagcaactgattttttcctttagtgattttatggtcttctctatcatctcttcgtttttcttttcctttatgcctgaacttttgtggtttttctccttttttcttaatcaagcacatgagaaatttatgttttatttatattttattatcagaaaactatctttgtactctttgttatctatttcattaatctaagcttttatagctattaattcccttttcttggctaactctatttttgttttcttttacttaagagtcatagttcatttatttgaagttcttctactaaaggcatttttaaaggctataaattttcctctgattgcagctttagctgtgacacgtagatctgattatgaaatatgttccttttcattgctttcttgatagttttaattttgtgttttgatttttctctttagagttcttttaatgtcttcttaatttttaagcagtaaatttttatcactgttatttatttctaatttagtaggcttacagtgaaaggatgtagcctatgaagtctccactttttttaaaatgaagattttctttgtctccaagtatgaaaataacatcattatttttgtaaatgctccacagacctcagaaaatatcttctgtatttgtataacacaaagttttatttgtatacatggacagacaaaatgtacattgagatggattgtgtatacatacttattcattgcctcatttaggtctgctctgcccttagttaaaaaaaaaaaaccctaatacatctgccaaattctgagacaggaaaattaaatcttcctgtacaattatgtttctaaaaattgagtggcaggtttcatggagtggtttggagcacagcctatatggccaaccttctttagggtcatagcccagctctgccattttcttatgtggccctaagcaagctactgcattctctgtgcctcagtttccacatctgtgaaatcaggatcctaactgcctgctcccaggactcctgtgttgactgagtgagttagaacatgtaagtgctcacccaggacccatatgcagcaaacagtcttgtgtctctgtctgctgccaaattggcctcaggctctatcaataccagatctgaataggggctattctttcttttagtgtccttaatgttgtattactttccaatattcacactttaactttacagatgagtagaatggaatagatgtgtttcagtacagaacttttttcttatgtttgcttgggctcccctcctctctgttacctatgttgataatctaggatttgttgtcttacatttttcctgatgttcatataatattcaatgaaataaaatacatgtgacataatgaaggcattatcattgttttccaaactcacgggatcatatcatacctgctttctgcatcttgtttttctcaatcagtaaaatagtaaaaatgcctctaaggctgctgaaacaattttattttgatttaattctatctctaattgaattttatttctatttcaattctattctaaaatttataatctctgcttaatttcctttggtgtacatactctgtgatgttctctatcgcttaaaattcattttgttcaagaacataggttcttgaacctgtttctatgtacagaacttttatttctatgtgttaactttccaggatgtattagtttgctaggactgccataacaaaataccacaggctgggtggcttagacagcagacatgtatttctcacaattctggaggatagaagtctgagatcaaggtgtcagcaaggctgctttccctgaggcctctttccttgccttgcagatggccgccttcttcctgtgtcatcacatgaccattgctctgggcacttgcaccctggtgtttctctgtgtgtccaaatatccttttctttaagggcaccagtcacactggattagggcccaccctaacagcctcattgtagcttcatcacctctttaaaggtcctgtctccaaacatgctgagtcacgtgccgaggtattaaagaccagggcttcaactgcaaaccttgtgggacacaattcagcccgtgacacaggaataggcttgttaatttcagtgatgtagccaggttgtttttctcgttttgtctgaccttgaattccacaggcagggttcctctttcccggccggcattcctgcccaccagtcctggcagagtgacttattgtcagccaagtggggcagagtttctccactgtacctctattgaaatctagtgccggataattctttgttgagggaggaagtcctgtctattgcaggatgtttagcagcatctccggcctcagttatgaccaccaaaaacatctccacatgttgctacatgtcccctggagggcaaaattgcccccagttgtgacctgctgagctaaagcagtccctcaggattgtttcttaaaacaaaacaaactgtttatttggccataattttgaactacagaaaaattacaagcacgagatataaaaacacctacatacccttcactaagatttaccagtttactaattgttacattttgccacatttgctttatcatttgaacccctttctctacattatattcacataacatgtttttctgaaacatctgtgagttgcatactccacagctctttgcccctaaacattttgctgtgtatttctgaaaaataaagatattatctttgaaagcagtaatacagttattgacttctgcaattaaacatcaatataatacttggacctaatttaatgcctatgttcccattttgtcagttgccatgacaatgtcctttgtggcattttttcctccactgcaagatccagttcagggtcagtactgcctttagatgtgtctcttcagtcttgtttaatctggaacatttctagtctctttctctgttatgacactgatattttttaaagatacagtcctgccacttcttgggggagtctgatgtttcctcaggttagatccacgttgtgtactctgtaagtgacctgatgtccttctcagtgtatcacatcctgaggcacacagtgtatctgccccttattaacgatgttattttgatcaccaaattgaggccgttatccacttttctaccttacagttactatattttgccttgcaaccaataaacaatcgggggagattctttaaggccatgcatataccctgctacttgttaaaaaaaaaaaaaaagtctctccagatttaaatgcttttggaaaccaggctttactgtggtagttgcaaaaatgatcattttccaactctagcaccccttccacgaaagtacagaaagaaaaaaaaatactgtccagttggaatggttacctcattgtggttttgatttgcattttcctaatgatgctgagcatttttccacgtgcctagtgcccaattgtgtatcttctttagtgaaatatttattcagatcttttgcccgtttaaaaaaatgagactttcaagctttttatttttagacattcatatgcagtggtaagaaataatagggatcccatgcaccctttagttagtttccgtcagtggtagcatcttctaaaaccatagcacaatatgataaccaggatgtcaacagcaagagtccagatgcagagtgctcccgtcgccacggggttcccattatttgtccttttacacggactttctcccatcccatccctccaatccctggtgaccactcatctgttctctgattctctagttttgtcttttcaaaaatgccacgtaaatggaatcacacaatacacgatatcttagaaacggggtcttttggctcggcatcattctctggattcattccggttgttttgtatcgcgacagttcattaaatcatagtgctgagtggagtttcacggtatggacatataccccagtttatttaaccattccctcatccaaggacatgtgggtcattcccagtttgggctattacaaatcagagtaggctgaacaatggcccccaaagtagccaggtcctaacgcctagaacctgtgactatcgccttctatggcaaagggcactctgcagatgtgtcaaattaaggaccttgagatggagagatcatcctgggttatctgaatgggcccggtgtaatcacaagggtccttataacagggaggcagaagaatgactacagaagagaaaaagggttacgtggccacggaagcaggggcaggaaatggcaatgtgatttgaggaaggggtcacaaaccaaagaacgcttccagaagaaaaggcaaggaaagggaagggatgctcccctgaagcctccagaaggaaccagccctgctgacaccttgatttttcgtcccctaagactcttttcagacttctggcctctagaactgtgagaaaaaaaaaaaaagcgtgtcttgttttaagccactaagtttgtggaaatgtattacagcagccatgggaaccttatacattgataaggatgacatgaatattcttgtaaggttcttgtgtgaacataagtttttatttctttgggataaaagcccaagcttgtaattgctgagttgtgtggcagttgcatgtttagttttataagaaactaccaaactgattttccagagtgactgcaccatttcacattccccattcctgccagcaaggtctaagtgatctagtttctctgcattcttgctggcatttgatgttcacactgtttttaattttctccattcagataggtgtgtagtgagatctcattgtggtttacatttacatttcctcattaggatgatactgaacatcttttcatgtgcctgtttgccatttttgtattctatgcagtgaaattcttgttgatatcatttttccatttcccaattagactttttgttaactgtcgagttttgggagatgtttatatattctagatacttatcttaagtcagaaacagggtgcaaatatttattcattgtagctttcattgtcatcatctcaacagggtactttacagagcaaacattttaaattttgatgagattcaatgtttcctttttatggattacacttctgatgtcaggtctaagaagtctttggccctggaccccaaatatcttctgctatagcttttttctaacagccttgtggagatatagtttacataccatacaattcacccatttaaagaatataattgaatggtttttagtataggcatacctcagagatattgtggttcggttccagtacactgcaatgaagcaaatattgcaataaagcaagtcacacaaattttttggtttgccactgcatataaaagttatgtttatattgtagtctattaagtgtgcaatagccccatgtctaagaaaacaatgtgcctaccttaattgaaagacactttattgctaaaaaatgctgacccagaatgaagtgagcacatgttgttggaaaaatggcactgatagacttgctcagtgcaggcttaccacacacatttaattttttaaaaacacaatatccacaaagtgcaaaaaagtgaagtgtgcctgtgtatccccagagctgtgcaactgccactccagtttgagaacatttttatcattccaaaaagaaacccagtgccttttaaatatcacccccaaacccactattccatccccctcagccctaggcaataactaatctttctctctatgggtttgcctattctggacattttatataagtggaatcatacaatgtatggtcctttgtgactggttactttcacttagcatcatgttttcaaggtttgtgcttcagtgcttctttttttttccccgagacagagtctccctctgtcgcccaggctggagtgcagtggcgcgatgtcggctcactgcaacctccgcctcccgggttcaagcaattcacccgcctcagcctcccaagtaggtgggattacgggcacgcaccaccaagcccggctaatttttgtatttttagtagtgacggggtttcgccatgttagccaggctggtctcgaactcctgacctcaggtgatccgcccacctcggcctcctaacctgctgggaccacaggcgtgagccactgcacccggcccttgtgcttcattcttttatgaatgaataatcttccatcgtatgatatacaatgaataaacattttgtttatccatttatttgttgataagcattttagattgtttccacattttgactactatgaataatgcttctagaacatgtgggtttttgtgtggacatgtgttttcatatctcctgggcatgaaagagatatgaaaggctgggtgtgttggtggctcacacctgtaatcccaacagtttgggaggccaaggcaggtggatcacctgaggtcaggagttcgagaccagcctggccaacatggtgaaaccccatctctactaaaaatacaaaaattagctgggcatggtggcaggtgcctgtaattccagctactcgggaggctgaggcaagagaattgcttgaacccgggaggaagaggttgcagtgagccgagactgtgccactgcactccagcttaggcaacagagcaagactgtttcaaaaaaacaaaaagaaaggaagaaaagaaagagatatgaaaacacatgggagtggaaagctgagtcaaatgatcactatcttttttttgagatgaagtcttgctctgtcgccaggctggagtgcagtggcgcgatctgagctcactgcaacctctacctcccaggttcaagcgattcctctgcctcagcctcccaagtagctgggattacaggcacatgccaccatgcccagctaattttttgtattttagtagagacagggttttaccatgttggccgagatggtctcgatctcctgacctcgtgatccacccgccttggcctcccaaagtgctgggattacaggtgtgagccacagcacctggccgataactatctttttgaagaactgaccaattatttccaaagtgggtgcctcattttacattctcaccaccagcatatgagcactgcgcaagttctccatatcctcaccaacacttgctattatcttttttcaattatagccatcttagtggttgttaagcagtatctccttttgggtgtgatttgcatttccctgtgactactcacgttgagcatcttttcatgtgtttattaactatatgtcaaccctgaagaaatttctattccgatttttcatccattctttaagttgggatatttgtctttttgtttttgagttgaaggagttatttatatatccagtaacaagtcccctatcagatagattatttgcaaatattttctcccatctgtaggttgtcttttcactttctttaaggtgtcttttgaagcacaaaagcttttaatttttatgaagtccaatatatctactttttttcttttgttccttgttctttggtgttatatctaagaaacctctgccaaatccaaggtcataaagatttacccttatgtttaccctaagaattttatagctttatctgttacgtatttatgtctttgatccactttgagttaatttttatatatgatgtggagtggaccaattgatttttctcatgtggatatcagttgtttcaacactatttgttcaaaagactattctttccgcattgaacattcttggcatccttgtcaaaaatcaattgaccatagatatatggctccgtttttacactctgattctattcccttgatctacatatctatctcatgccagtatcacattttctcgaatactgttactttgtagtcaatttggagatcaggaagtatgaagcctccaacttttctttttcaaaattgttgctattctgggtcctttgcattttcatatgaagttgaacatcagcttattattctacaaagaaaccagctgagattctggtaaggattgtgttgagtttgtagatcagcacgattccgggagtgttgccatcttaacaatattaagtcttccagtctatgagcatgtaatgtctgtccatttatttgtatcttcttttctttcaacaatgttttgtaattttcagaggataagttttgtacttgttaaacttattcccaaggtattttattttttctttattatggtaaaaatatacataaaatctactattttactcattttaagtatatagttatgtggcattaggtaaattcgcactgttgtgctttattcttttttgatgttatacatggaattgttttcttaattatattttcagattgttttttgacagtgtgtagaaatacaattgatttttatatactgattttgtctcctgcagccttactgaactcattcgttgtaattgtttcacaatggattccttggggttttctgtatacaacattgatacggtttggatgtttggtccctccaaatctcattaaaatgattcccaatgttggaggtggggtctggtggggggtgtctggatcatggacggagccctcgtgaatggcttggtaccatccccgtggtaatgagcgaattcttactctggtagtttatgctaagagctggttgtttaaagaatctgctacctccctccaccttgctcctgctcttgccatgtgatatgcctgcccctctgcctttcgccatgattgtaagcttcttgaggccctcaccaggagcaggtgctggtgccatatttcctgtatagcctgaagaactgtgagccaattaaaatcttctttataaattacccagcctcgggtgttcctttatagtaacacaaaactggaccagcacaaatttatgtcatctccaaatagttctacttctttctttcagtctggattctttttcttcccaaattatcctggatggaacactcaataaatgttgaatagaagtggaaagagcagatctctttgtctcattcctgatcttaacggggaaacattcagtcattcactgttaagtatgatattatctgtgattttttttttttttttttttttttttttgagacagagtctcgctctgtcacccaggctggaatgcagtggtgtgatcacggctcactgcaagctccacctcccaggttcacgccattcttctgcctcagcctcccgagtagctgggactacaggcgcatgctgccatgcctggctaatttttttgtatttttagtaaagacggggtttcaccatattagccagtatggtctcgatctcctgacctcgtgatccacccgcctcggcctcccaaagtgctgggattacaggtgtgaaccactgcacccggccaactgtgatttttaatagatgccctttatcaggttgaggatgttcctttctattcctagtatattgagtagggctttttctcccatcatggaagggtgttgaattttatcacccaaatgcttttctgtgtcttttattctatcattaattgctatagactgaatgtgtgtgtttcctcaaaatgtatatgttgaaatcctaacccccaatgttggtattaggaggtgaggcctttgggaagtggttaggtcatgagggtggagacctcatggaatggattagtgcccttgtaaaagagacctcagtgagctcctttttttcttccgtcatatgaggacacaagaagacaactgttcatgaaccagaaagcgagtcctctccagatgctgaatctgccagtgccttgaccttggacttccaagcctgtaaaattgcaaaaaataaatttctgtgtttataagccaccagttcgtgatactttgttataacagtctgaacagactgacagaaatcgtggtgttttgtcttttattctgttgataatggtgtattacattaattgattttcagatgttaattcaaccttgcattcctgaaataagtcccatttggttataatgtataatcctttttaaacattgcttgattttacttgctagtattttgttgagggttttgagggttttacatcattttcatcacagttattgtaatgaaatacaaaaatcaatagtattcctatacactgtcaaaaacaatctgaaaataagaaaacaattctatttacaacatcaagaaagcataaagcacaatagcgtggatttacctaatgccacagaactatatacctaaaatgggtaaaataaattttataagttctcttttcatgtttttgtctggttttggtgtcagggtgatactggactgaaagaatgtattggaaaaattttccttctcttctatttttttgttgttggaagaggtcataaagaattgatattctttagatatttgttagattcactcatctggccctcttgggcttttcttttcaactagtgttctcataactaattcaatctctttaacttattacagatccattcacattttctacttatttcttagtcagttttcatagttttcatctttctaggaatttgtcaatttcatctaagttttataatttattggcacaaaattgttcatagtgttccttcataatcctttttatttctgtcaggttggtagtatacttccctcattcattcctttttccttttctttttgagaaacagagtctctctctgttgcccaggctggaatagagtggtgtaatcatagctcactgtaacctcgatctcctagtctcaagtgatccttgccccttagcctatgacaggtgtgcaccacaacaccagctgttattcaaaaaatattttgtagagatagggtcttgctttgttgtgcatgctattcttgaactcctggccacaagcaattctcgaactcctggccacaagcaattctcctgccttggcctcccaaagtgctgggattacaggtgtgagccactgcagctagcctcgtttttttgctttaatttgtaaaactgtcattcatttctgattttagtaatttgagttttctctctccccctttgcctcatgcacttccctctctgtctttcctcctccccctctttcttcctccccttcttttcttctccctctccctctctcttaccaatctatcaaaggtttgttaatttcaaagaaccaaattttggatttgttgactttattatttttatattctatattttatttctactctaatatttattattttgttttttctacttgctttaggtttagtttgctcttctttttctagtttcttgaggtggagagttggcttactgatttgaagccttattttttgatataggcattcatagctataaaattccatctttacactgctttaaatgtatcccataagttctgttatgttgtatcttcattttcattaatctcaaagtacgttccatttcccttgtgaattctttcacccattgattatttaagaatgtagtgttgtttaatttccacatgtgtatgtttccctaatttctttgctactgagttctacttttatttcattatattcagaaaaagataccttgtattatttcaatccttttaaatttatgcaggtttgtttcgtgacttagcatatggtccttcttggagaatgtctcatgtgcacttgaaaatactgtatattcaatgttggttgttgggcgaagtgctctataattaccttttgagtctagttggtttatggtgttgctcatatcttctgtttccttattgatcttctttcttgtactacacattattgaaagtggagtgttgaagtctccaactactattgttgaattggctatttctctgttcagttctgtcagtttttgcttcttatgttttagttctctattgttaggtgaatatatgtttataatcattgtatcttctcatgaattgacattttatcattatgagatattcatatttaacttcagtaacattcttaatttaaaatctcctttgactttattatagcacttcaggttacttatggttgctgcttacatgatatatctttttccatccttttactttcagttggcatttatcatctaaagtgtgcctcatatagatggaatacagatggatcctgtttttcaaatctggtctgataattcctgcctttgattagattgtttaatccattcacatttaatattattattgatataattagatttatatccacagttttacttttggtcttttctatgtactatttcttgttcctctatttctcctttgctgctttcttttccatctagtgactactttctaatataaattttcatttcttttatgattcttcaatattctatttgttattagtgtttgctctagggcttaccttatgtatcgtctcaaaatttacttcatatttatattaatcctggtgagatacagaagttattcctgtatgagtttattcagttttaccactttttgtggtattgttacatatattacatctttattatgcgctattataatgatcatactatataatgatatatctttaaagaagctgaaaggagagcaagtatatatttctagtttctgttttattaacctccttatatcatatatttgatccacttttttggtttttatggatttgagttaccaactggtggtatttccttactctagaacagctttgctcctatttacctccttgctctttgcttttggatatatgtgaacttcctgggagcacttcctttttgcctgaagaacttcctctagtagttcttacaaaactggtctgctaacaaggaattctgtttttgtttatctgggaatgcttttattttgccttctttttgaaagaaacttttctggacacagtattcttggttggctttttttttttttttttttttttttttttactttgagcacttgggatctgttaccccactactttctgggtaccactgtttctgacgaaaagtcagctccacatttgtctccctgacaccagaacaggggagggtattaagcagagtgccacatagcctcacctcccaccatttcatccaagaatagtagttgggtaatagttcaataactcactctgaataattgatagaacaacaagacagaaaatcaacaagagttagtactattattgttgagttgtctattattgttcagttgtctgtttctctcttcatttctgacagttttatttcatatacttcagggctgtgtttttagctgttataaatttttatttctttatgacttctgtttatgatttctatttcttcctgttaaattttcccttttgtcattgtaaaatgcttctcagtatctctaataacatggtttgtttttaaagtctattttgtctgattttatttatttttattttatttttgggatggagtctcactctgttgcccaggctggagtgcagtggcgtgaccttggctcactgcaacctctgcctcccggattcaagccgttctcttgcctcagcatcccaagtagctgggactacaggcatttgccaccatacccagctaatttttagtagagacagagtttcaccatgttgaccaggctggtcttgaactcctgacctcgagtgatctgtctgcctcagcctcccaaaatgctgggattacaggtgtgagccactgcacccagccaattttgtctgattttagtacagtcactctagctttcttattactgtttgcatgtcatctttttccatcattttactttcaactatgtctttgaatctagaatgtgactcttatagaccatatatatttggatcctgcttttaaggcagtctggcaatctctgctctttattgagtttttaattcacttatatgtaatataattattgatatggaaggatttatatctaccatgttgttatttattttctatatgtctcatatcacttttgttcctctcttcctcctttactgccttctgcaggttgaatagatatgttctagagtaccattctaattcctttgttagtttatttcccccatttttaaagtgtaatctggaggttacaataagcagcttaagcaaaaacaatctgcttcaggttaataatctactcaaatatttttgtctgccctattctctccttctcagtactcttattaacacatatgttgttactccttaattccacatatgttttctactcttaattacatatatgttacaacttaattacacatacattgttacacatcctgttaggacaggggttcccaaccccagggccatggactggtaccagtctgtggcctattagaaactgggctacacagcaggaggtgagcagcaggcaagcaagcattactgcctgagctctgcctcctgtctgatcagtgatggcattagattctcacagagagcaaatcctattgtgaactgagcatgtgagggatctaggttgtgcactccgtatgagaatctaactaaagcctcccccaactggctgtggaaaaattgtcttccacaaaactggtccctcatgccaaaaaggttggggaccactatattatggtatccaatgggtatctcttcatttttcttcattatttttctttctattcttcagtctgaatcatctttatggatctgcgttgaagttcattgattctttcttctgccaggtcaaatttgcttagccgcactagtgagtttttcacctaagttattatatttcacaactacagaatttctatttggtttctaatttctatctctatattgatattatctatttgatgagtctttgtcatcacacttgcattctttaatgtggtttcttttggttctttgaacatagttataatacttactttgaaatcgcgccctaacatttggggcccttcagagataattcctatttattgctcattattcttgttcaagggtcacaattttctgtttctttgcatatctcattttttttgttaaaaacttactttagataatatatcgtagaaactctggattctagttcttctccctaaccagggatgatttctgttactcatttatttgtttgctcgcttgtgtatgccttctctgcatggattctgcagagtctgtgttctcctgcagtgtgcagccactggtgtctttgctcagttttgtttgttttaattcttatgtttgttttgtaagcctggcttcattggtgtcacccctggatcagcataacctagtggtcaagccatgattagtcagacatttgtttaaacatcttgagccagtgaatcttccaccctctgctgaggggatctatgtgtgggttgggacattcaaagttcaggcactttataactctgtcctgtattttactgtctgcttgcaaaaggtctcacagtcagccaaggataagtagatagcaggaaacctctctgatctctcctgcaagcatgtacaacttccatatctccagaattccttttaaaatttttcttaatctgtcgcttgcccaaccagtattgaaacattaggttgctgtgatgtgggttgcctccaattatttgccactgaaatccttgttgcttaacatagtgcatagggttttctatggaattcaaaatcagatgagccttctttgttgctggtcctcaagcctaccgtgcccctgagcttgggtggggagatggcagccccacgttaaatcataaccctgctattcttaggaaggcttaatattttttctttaattagcacttttcaattttatatttctttgtccagttttatcattgcttttcagggagtggttatatcaaggtgctcattccaccacctcagaagtggtccctatcttgttaattttattttttgaatacatataacattaacatacttccaaaagtcaatactaaacaaaaggagctactgagagaaatcttcctctcacccatatctcttccatcctaattccccctacccattataggtaaccagtttcagtgttttctagtttatagtttgtgtgtgtttgctctttataagacatgattattttctcatttcccaaaaaagtactattctgtatatgcccttttgaactttgcttttctcacctaacaacatctcctagaaatcactcaacatccattcacagagatctttctcattgcattgctaaagttgcatagtattccttagtgtgactgtgctataacctttcaaccaatctcttatgcttgcatgtgtaggtggtttctagatggcagctatgctcaccattctttggctttcctaccatgtctctgagatacatctactccataaatcgaatctacccccaagaggtgattctctgagggtgccacctcaaatcttagtcatttgcaagagcctccactatagctgctgctctggactacctatttctgacatgtgttctccatgttgacatttaatatagagtcttctttttctggtgataattctgtctgtgctgctttttagtcttctgtgcaccctttaaattttttaagtaacagaaaccatttcaaaatgtacaattcagtgtcacttagtacatttacaatattgtgttttttgtgtcttttctaagaatttatttccaatctcaagtcataaagatttactcctgttttctactaagaaatttatgcctttaactcttattttttggtctctgatacattttgagataatttttatatgctatgagttatgggtccaacttcattctttgatatatgaggatccagttgccccagcaccatttgttaaaagactactcttcccactgaattcttgatacatttgttgaaaatgaattgatcatatatgtgagtgtttatttctacattctctattatattccattggtctatatgtccatccttgtgtcctagagaccacattgtgtcagtaccacattgttttgattactgcagctttgtaaaagttttgaaaatggcaggcctgagtcttccaactttgttctttttcaatatgattttagattgtttggggccctgggaaaattccatttacattttaaaatcagtttttacatttctgcaaataaaaaggcccttgggattttgataagggttgcattgaatctgtagatcactgggtaatatcgccaacttaacaatatttaatcttccaatctgtgaacacaggatgtatagttctatttatttaagtcttctttaatttttgtcaacagtgttttgtagtctttagtgcagaagtctttcaccttcttgttttaatttattcctagctattttactctttttgatgctattgtaagtggaattttaaaaattgacttccttcttgggctgttcattcctggtatatagaggcacaaatgattttcttaaaataaatgttgaacatgtaccctgcaattttgctggacttgtttattagctctactagtttgtggattctttgattttctagatagaagatgtcattattgaataaagagttttactgcttcctttccaatttggatgctattcatttacctgtttgtttatttatctgcctaattgtcatggttaaaactttcagtacattgttcaatagcactgggtaaagcatacagccatatcttactctttgttatgggagaaatttttcagttttttttctcattaagtatattagttgtggatttttcacaaatcctctttaacacattttgaaagttccatgtttttatcctgaaaggttgtagaattttgtcaaatgcttgttctgagtgaattgaaatgattgcatggattttttatccttcattgtattaatgtggtgtattacattgattgatactcttgtactgaaccacccttgtattcttgagataaattccatgtggtcatgatatataatcctttttaatatgctgctgaatttggcttactagtactttgttaaataaaagattttagtatctagtttgtcttttcttgtggtatatttgtctggctttggaatccatgtaatactggcctcatagaatgtattgcaaagttttttctcctctgttttttggaagagtttgagagggattggtgtgaattcttcaagtgtttggtataattcaacagtgacgccatctgtgtagcattttcttcattggaaggtttttggttactgattcaaactttctacttgttatgggtctgctcataatttcaatttctgttttggtctgtattagtattttgtgaattcgtccatcttatctaggttatataatttgttggtatacagttattcatagtattcttttatcacactttttatttctgtaagatcagttatatcgttcccacttttgtttttttttcttatttttgtttttttttgttgtgttcctacttttgtttatgattttagatatgtgcaacttctctaattttttattagtcattctagttaaaggttttcaactttgatcttttcaaaaacaagcaacttttggttttgttaaattatctctgttgtttatttaagctcgaattcagttttatctccactcatacatattatttcattctctcttttaactttaggtttacttcgttcttctttctctggttacgtaaggtataatattaggttatggatccttcttctttttcagtgtgggcattcacagctataatttttcctctgagcacttctttcactacatcccataagtctgagtatgttgtgtcgtcattttcactttttgaaagtattttataatttcccttctgatgtcttctttgacacaataatttttaaagagtgtgtagttttatttccctgaatttgttaatttttaggtttttcttctgttacagatttctggcctcactatattgtagttagagaagatattttgtatgatttctatattttaaaatttattgagactcttttgtggcctaacatatcatccctcctagggaatgttccatgtgcacttgagaagaatgtgtagttgggtggagtgtccatatatgtttgtaggtctagttggtttatggtattgttcaagtcctctcttttcttattgggcttctgtctggctgtacattatcttgttgtgttttttttttttaattttaaaaatatgcatatttagtgtataaaacatacagttaaatcgttaacatagtgatgcaaattaatatgtccatcatctcacagttattcttttgtgtgtatgagtgagaaaagctatgatctactcaattggcaaaaattccaaatgcaatatactaactattctcatgttctacatgagatctctagacttgttcatcctatatatctgctacttggtatcctttgacctacatctttccattttcttcccccacaccttgcccatggtaaccactagtttattctatctctgtatatttgacttttttctttttaagattctacatataggtgagattatttaaaacttttcatttgtatatggcttatttaacttagcacaatgtcttccagtttcatccatgtggcaagtggcaggatctccttttttaatgcggaataatattccattgtagacatacacaccacagtttagtcatccatcaatggacacgtaagttttcatatcgtgactcatgcatataatgccacaatgaatataggagcgcagatatctttatgaggtggagatttcattttctttgggaatatacctagaagagggattagtgggtcagatgatagtatattttcaatttctttaggagccaccattctgtttttcattatgactgcaccaatctacagtcccaccaacactgtacaagagttccctaaccctagccaacacttaatagctattctcatgagtgtgaggtgatatcgcatagtaattttgatttgcatttccctgacgattagtgatgttaaatgtcttttcatatatgtgtttgccatttttataacttctttgcaaaaatgtctactcagttccactgcccattttttaattgggttatctattttcttgttattgagttgtatgcattccttataaattttggatattatcctcttataagatatatggttggcaaatattttcttctagtccataggttgccttttccttttgttgactgtttccgttcctgtgcagaagttttttagtttgatggtataccaattatttgtttttgtagcctgagcttttggtgtgatctccaaaaaatcactgccagagccatgtcgagcttttcccctatgttttcttctggttgtgggttttggtcttatgtttaggtcttttatccattttgagtttatttctatgtatggtgtaaggcagcgatatcaaatcttttggcttcccggggccacactgtaagaacaattgtcttaggccacacataaaatacactaacaataacaacagctgatgggctaaaaaaatgcaaaaaaattcaatgttttaacaaagtttacaaatttgtgttgggcctcattaaagccatcctgggcttacatgtggtctgtgggccatgggttggacaagccacagaactgggtttcctaacgtcatttatgagagagactatctttctgcattgttttcttcgtgttcttgtggaaaattggttgatcatatatctttgaatttctttctgggctctctattctgttccactggtctacatgtttgttttttatgccaggaccatactgtttgatcaatagttttgtaaaataaaccagaaagtatgaagtctccctttgtttttcagaacagaattttcagaatttcgttggctacttaaggttcttgctattccaaatgaactttagaatttaaaaaaattttccatgggattttgatagggattttattcaatctgtatattgatttggatattattgacattttaacaatattattcagattcatgagcatgggatatctttccatttatttgtatcttgtttaatttctttcatcaatgattcatagttttcagtgtacaggtctttcatctttttggctaaatttattcctaagcaatttttttgatgctatcataaatgggattgttttcttgatttcttttttggccaggtcattatttgtgtatagaaatgcaactactgttttatattgattttatatcctacaactttactgaactcatttattagttctaacaggttgctttgtcagagtcttcggggttttctatatgtaggatcatgtcatcttcatataaagataatattacttcttacttcctgatttgaatgtctttcatttctttttcttgtctgtttggttgtactagtacttccagtactatgttgagtagtagtagctagagtgggcatccttgccttgtactggttcatagtagaagggcttctgttttccctcattgattataacgttagctgtgggcttttcataaatggcattcgttatattgaggagtgttccttctatacctgaactgttagaatttatcaacaaaggatgttcaacttcatcaaatactttttgtgtgtcaattgagatgatcatgtggttttcatctttcagtctgttagtatcacattgattgctacatgtatattaaataagatttgcatgccagaaattaattccacatagacatgatatataatctttttgatgtattgttaaatttagtctgccaatattttattaaggatttttgcatcggtattcttgggttatgttggcctgtagtttccttttcttgtgatgcctttggctcacctgggtatcaaggtgatgctggcctcataaaatgtgttaggaagtattccctttagctgcatttttttttttttggaagtattccctatagctgcatttttttggaagagtttaagaagtattggtattctttgaatattgggtagtattcagtcatgaagctatctggtcctgggcttttctttgtttgaggttttggggtttttttaacttttatttttgatttagagggtatatgtacaggtctatatgttgcatggtatatggagtatactgcatgatgatgaggtttggagtgtggataagcctatcacccaggtagtgagcatagtacccaataggtaggttttcagcccacctctccattcctcccccaagtagtccccagtgtctactgatcatctttatgtccatgtttactcagtgtttaggtcccacttgcaagtggtaacatgcagtatttggttttctgttcctgcattaatttgcttaagatagtggcctctagctgcatccatgttgctgcaaaggacgtaagttcattcatgtatatatatatattttttttttttattttttttttagacggagtttcgctcttgttgcccaggctggagggcaatggcatgatctcggctcactgcagcctccgcctaccgggttcaagtgattctcctgcctcagcctcctgagtagctgggattagaggcatgcgccaccacgtccagctaattttgtagttttagtagagacagggtttttccatgttggtcaggctggtctcgaactcctgacctcaggtgatccacccgccttggcctcccaaagtgctgggattacaggtgagagctaccgcacctggccgaattcattcatttttatggctgcatagtattccatggtgtacatgtaccacattttctttatccaatccaccactgatgggcatctaagtggattccatgtctttgctgttgtgaatagtgctgtgatgaacatacaaatgcatgtgtctttttgatagaacaatttattttcctttgaatatatatccagtaatgggattgctgggtcagatggtagttctgttttcagttatttgagaaaactccaaactgcttagcacagtggctgaactaatttgtattcctgccaacagtgtataagcgttcccttttctctgcagccttcccagcaacttttatttttttgactttttaataattgccattctgactggtgtgagatggcatcccattatggtttggtgtttttttgttgttgttgttttgttttgtttttttttgtctgttttttgcttttttgtttgtttgtttgttttttgagaaagagtcttgctctgtctcccaggctggagtgcagtggcgcaatctcggctcactgcaacctccacctcctgggttcaagcaattctcctgtctcagactcctgagtagctgggattacaggtgaccgccaccatacctggctaatttttgtgtttttagtagagacggggtttcaccatgttggccaggatggtctcgaatacctgaccccagatgatccacgcacctcagcctcccaaagtgctaggactacaggcatgagccaccgtgcctggcctcattatttgcatttctgattattagtgatcatgagaatgtttttttgtttggctacttctgtattttcttttaagaaatgtatgttcctgtcctttgccaattcaattggattattcgttttttgcttgttgattggtttaagttccttatggattctggacataggacctttgccagatgaatagtttgcaaatattttttctcccattctatatgttgtctgtttactctgttgataatttcttttgctatgcagaagctctttagtttaccactgtgatctctttgctattggtctgttcaggctttctattcctgatttaatcttagcaggttggtttttttctaggaatttgtccatttcctctaggttatccaatttgttgggatataattgttcataaaagtcccttatgatcctttttatttctgaagtacctgttgtaatatattctccattttcatttctgattttgtcctctttcttagtccaagagtttgttgattttatttttcaaaaatcaattctttgtttcaaaaattgaagtcttagttttactgacttttttcccctatggtttttctttctaacttgtctctgttctgatctttattatttccttctgttaactttggctttagtttgttcttctttttctaattccttgaggtacaattttgggctatttgaaatatctcttcttttttaatgtaggcaaggcatttattgctgtaaacttccctcttagaactgcttttgctgcatgttttgcttttggtatgttgtgttcccactgtcatttgtctgaagatatttttaagtttctgttttcatttcttctttgactctacccattactgaaagtacgttattgaagtccctaagtattattgtagaactgtctttctcactccaattctgtcagtatattttcttatattctggggctctatattttggtgtgtatacgtttccaattgcgaagtcttgagtaattttccattttctcagtatgtaatgtcctcctttgtctcctataacaatttttaaattcaagtttatttcttttattagtataattacctccagctttctttaggttactatttgtatgaaatatcatttttcattctttcactttcaatctacttgtgtctttagaccaaaagtgagtttgttatatacagcataggttgatggttttcttttaaatccattctgccaacctctgctttttggagaatttaatcgacttacatttaaagtacttacttataaaaaagaagttctgacattttgtgccttttcttttgccttacattttttaaatacaacatttcctcccttactgcctttttttgtgtttgatgattttctgatagtgtaccattatgattctctattcgattgtctgtatgtgtgtatgtgtattttaaagactttatatttttagagcagttttagggttccagcaaaattgagaggtaagtacagagatttcccgtatacccactgcacccatacatacagagcttttcccattaccaactctcccaccagagtggcacgtttgttacaacttatgaatctgcatttacacattattatcaaagtccctagttaacattagggctcactgttggggtgtacattctgtgggtttctacaaatgtgtaacatgttgatatggtttggctctgtgttcccacccaaatctcatcttgaactgtaatccccatgtgtcaggggaggggcctggtggggggcaaacttcccccttgctgttctcatgatagtgagttctcatgagatctggttgtttaaacgtgtgtggcacttcccatctcactttctttccctctcctgttctgccatggtaaagatgtgcctgcttctcctttgccttccgccatgattttaagtttctgaggcctgccagccatgcttactgtacagcctacaaaactgtgagtcaattaaacctcttttctcacaaattacccagtctcaggtagttctttatagcactgtgagaacggactaatatgcatgtatctaccattatagtatcatacagatacgtatatttacatatatttgtacattttcactgccctaaaagtactctgtgcactgcctattcaacccttcttccccaacaacccttggcaaccactgaactttttactgcctccatagcattgccttttctaaaatgcaatatgattggaatcatacagtatgtagtttcttcagattgccttatttcacatagtaatatgttttttaattacctccatatcttttcatggcttgatagctcatttctatttagtgatgaataatatttcattgcctggatgtactacagtttatctgtctactcacctatggaaggacatctcggttgcttccaatttcaacaatcacaaataaagcttctgtaaacatctctgtgcagatttttatgtgaatataagtcttcacctcctttgagtaaataccaaggatgtgattgctgaactgcatggtaagaatatgtttaattttataagaaaccactgatttcgatatactctggattcttcgggggatatgtatacacattcagaagtggaattgatggatcctatgataattccatttttaattctttgaagaaccaccaaactcttctccaccagggctgcaccactttacattcccattaatggtatatgtcaaagtggctgtaccattttgcattcccaccagcaatggatgagtgttcctgttgccccacatattggcaagtatttggtattgtcagtgttttgaattttggccattctaataagcgtgtagatatatcacatttcttgttttaatttccatttccctaatgacgtaagatgtggggcatcttttcatatacttagttgccatctgtatatcttcattggtgagatgtctgttaaggtcttcagtccattttgtaatcagattgtttgttttctaattgttatgtttttaaggttctttatatattttggatgagtcctttatcaggtatatcttttacaagtattgtctcccttctgtggcctgtcctttcatcctcttgacagtatgttttacagagcagaaacttttatttttaacaaagtctagcttatcaattatttctttcatgaatcatgcctttggtgtcatatctaaaaagccatcaccaaactaaagatcatctagatttcttcctatgttatcttctgggatttctatttgttgttgatttccaaatcttttattgtggcaaaatacacttaacataaaaattaccatcctaaccaattttagtgtacaattcagtgaatgtattagatacgttcacaatgctgtgcaatcatcactatcatccatctccataacacttgtcatttgtaattatgaaactctatatccattaaacaataattccccaacccccccaccaccgccatctcttggaaaccaccttgtactttctatgtctctgatttgactattctacatacctcatataagtggaaacatacagtacttctcttcttgtgactgctgtatttcatttaacataatggcctcgaggttcatccatgttgtggcatgtgtcaaaatttctattttttttaaagctgaataatattacattgtatgtatataccacattttgcttatccattcttccatggacatttgggttgcattgatgttttaactgttgtaaataatgccactacaatcgtgggtatacaaatatatctttgagactgcttttaatccttctgggtgtatacacagaggtggagttgatggatcagataattctgtttttaatttttgaaggaacaccaaactgtttaacacagaggctgtaccattttgcattcccactaacagtgcacaaggattccaatttctccatgtcccttccagcagtggttattttctgtttatgtgggatttttttgagacaagatctggctctgtcacttaggctggaatgcagtggcatgatcatggcacactgcagcctcaacctagacctctgggcttaggctatcctcccaccttaacctcccacgtagctgatactagagatgggtctcactatgttgcctaggctgtgtttatttttttaatagtagtcatctgagtgtatgtaaggttgtggttttgacttgtatttcctaatgactagagatgttaaacaacttttcacgtactattatccatttgtatatcttctttggagatacgtctgtccaagtcctttgcccttttttttttttttttgagatggagtctcactctgttgcccaagctgagtgcagtggtgccatctcggcttactgcaacctctgcctcctgggttcacatcattctcctgcctcccgagtagctgggactacaggcgcccaccaccacgcctggctaattttttgtatttttagtagagacggggtttcaccctgttagccaggatggtctcaatctcctgacttcatgatcctcccgcctcagcctcccaaagtactgggattacaggcgtgagccaccgtgcctggcccttttgcccatttttcaggtgcattgttttttggtgatgacttttagaagttctctgtataatctggacattaatcccttatcaggtatgtgatttgcaaatttttctcccattctgtaggttgtcttattgcttagttgatattattttaatgcacacaatgtaaatttttaaaatttatctagttttacttttattgcctgtgcaagtacaatttatctatttttacttttattgcctgtgcctttggtgtcgcatacaagaagcactgccaatgatgtaaagtttttcccctatgtttccttataagacttcatagttttaggactttgacccattttgagtaagtttttgtacacagtgttaggtaagggtctcaacttcattctcttttatacatggttaggtaaggatctcaacttcattctcttgagttaatttttgtgtatggtattaggtaagggtctcaacttcagttatcctggcaccatttgttgaaaatacagcactttccctattgaatggtcttggcactcttctcaggaatcatttgatcatgtatacaagggtttatttttgggctctctattcaattccattggtctctacatctttatgtcaataccacatagttttgattactgtagcttcgtaataagttggggtttttgtttgtttttcagacattcttactctgttgcccacgctggagtacagtggcattatcactgcttactgccacctcaatctcccaggctcaagcaatcctcccacctcggcttcttgagtagctgggaatagaagtgtgtaccattacacctggccaattattttattttttgtagagatgaggtctccctgtgttccccaggctggtctcaaactcctggactcagaagtcctcccacctcagccttcaaaagtgctgagattacaggtgtaggccattgtacctggcctgtagtaagttttcaaatcagaaagtgtgagtcctccaatgttgttcatcattttcaagaatgttttagctattcaaggtcccttgagattccatgtgaattttaggatggggtttcttctttctgcaaataacatcattaggatttttattgggattaccttggatttgtagattgttttgtgtggtactgacaccttaacaatattggccttccaatccatgaacataggaggtgttttccctttatgtctactttaatttctttcagcattgttttgtaattttcattgtacaagactttcacctccttggtaaagttggttcctaagtttgttattcttgatgcttttttcagcttttattgaggtataattgacaaattaaaagtgcatatatttaagaacatatttgacctactgtgaaatgattactacaatcaagccaattaacatataccttacatagttgccatgtgtgtgcgtgtgtgtggtcagaatacctaagctatactctcttagcaaattccaagtatagaatatattaactatagtcaccaatctggacgttatgtcaagaacttattcatctgataactctatgtttgtacccttcaacatttcctatttcccctactccctgacccctagtaaccacccttctactctccgtttctctgagttcaagctttttagaattccatatgtaactgggatagtgcagtatttgtctttctgtgtctggctatttcacttagcataatatcctccaggttcatctatgttgtcataaattgcatgatttcctgctttttaaaggatgaatatttcattgtgtgtgtgtatatatgtgtgtgtgtgtgtctgtatgtatatgtatgtgatgtgtttatttgggaatttggtgatacacacacacacactattttcttcctttctttttgagacagggtctccatctgtcatccaggcaggagtacagtggcacaatcacagttcactgtagcctcaacctcatgggctcaagtgatcctcctgcctcagcctcctgagtagctgggaccacagtcatgcacccccatgcccagctaatttttaaaattttatgtagagatagggtatcactatgtttcctaggctggtctcaaactcctgtgttcaagctatccttcaccttggccacccccaagtactgggattacaggtacaagccaccatgcctatgaatactatgttgctcatttcttgactactgtaacactacaatgaacatgggagtgcagatacctcttcaagatactgactttgttttccttagatatacccggaactgagactgctggatcatatagcagttccaattttaattttttaaagaaaatctatcgtgttttccataatgactgtatcaatttacattcctaacaaaaatgtataagggacaccttttctccacatcctcaccaacacttgctatcttttgactttttgataatagcgattctaacagttatgaggtgatatctcagtgtggttttcatttgcatttccctgatgataagtgatgttaagcacctttttatatacctgttgaccatctgtatgtcttctttgaataaatgtctattcagtcccttgtccatcttaacaggttattaattgggttattaagtttttttgctagttatatgagttccttatatatattggatattaatagcttatcagatatatggttggaaatattttctcccgctacatgtgctgccttttcattttgttgtttcctttgttgtgcagacacttttttgtttgatgtagttctaatttatttttgcgttttattccttgtgcttttgatgtcacatctaaaaaattgtcacaaaaaccaatggcaaggagcttttccctgttttataggttttatggtttcaggtcatatgtttaaatcttattcacttttctctacagtgtagggtaaggttccaatttaatttttttgcatgtggatatcctggtttcacagtgccatttattcaagagagtaccctttccccattgtgtactcttggtgtctttgtcaaagattagttgaccataaatgtgtgggtttatttctatgctttctattctgttccattggtttatttctataccagtaccataactttgaaatataattcaaaataagcatgtgtaatatctttcactttgttcttattgctcaagtatgctttagatctttaaggtcttttgtagtttctttcaaattttaggattttttttgtctatatctgtgaaaaaaagtcactggaaatttgataggcattgccttgaatctgtagatcactttgagtagtatagctatttcggcaatatttattctattgatctatgaacaccagatatctttccatttatttgtatcatcttagaatttgttcaatgtttcatagttttcagtgtctaggtcttttatctccttggttaaatgtatgcctaaatgttatgcagtccaatttctctattttttattttatctgtgcctttcatattatatccaaatgaagtcaataccaaatccaatgtcatgcagtttttgccccatgttttcttctaagagttttatagttttaggtcttacatttaggtctgtggtccactttgagttaatttttgtatatggagttaggtaaaggtctcgacttcattctctcacgtgaggatatccagttttcctggcaccatttgttgaaaagagaatccatttgccattgaatggacatggcatgcttgtcagaaatcatgcgttcatatatgaaaggatttatttgggagctctctattctttttgatgctattttaaatgaaattgttttcttaatttgtttttcaggttgtttattattagtgtatagatacgcaaatgacttctgaatgctgattttgtatcctgccactttactgagttagattattacttctaacaggttttttttgtggagtctgtagcattttctacatatatgatgtcatctgcaaacagagacaattttacttccttctttctgatttgagtgtatttatttatttttcttgcccaattcctctggctaggacttccagtactgtgttgaatagaagtggtgagaatatctttttcttgttcctcatcttagaggagaggcattcagcttttcagcattgagtatgatgttagctgtgggctattcatatatggcctttattgtgttgcagtacattccttctatacctaatttgttcatagtttttatcatggaaggatgttgaattatgtgaactgcattatttgcacttatcaaaatgattgtatgatttttatctttgattttattaaagtatcccatttcttgtatatgtacacttaactgtccttatgtactaaggataaatcccatgtttgtgatatatgatttttttaatgtgctgttaaattcagtttgatcatattttgttgaaaatttttaaatgtatagtcataaaaaaatatcagccagttattttcttttcttatattgtccttgtctggccttagtatgagggcaatgctagccttgtaaaataagttgggattgttccctctttgtttggggggaatattttgatcttatacttcccccgctacattttatttttgatgccccaaggtacaccttttaatattgcatatccattgagaaattatgaaaacaatagtaatttttaattatttttcttttaacctttatactagagttatgtgatttatatactaccattacactattagagtattcttaagttgcccgtatatttatttatcagtgaattttgtactttcatatgttttcatgttactaattatcatccttccatttaagcctgaataactccctctggcatatcttgtaaggcaagagtagttgctgataaactccttcaacttttgtttacctgaggaagtcttgtatctgtttcatatctgaaggacagctttgctgtgtaaagtattcttagatggcagttttttatctttcagaactttgaatatataatcctattgtttcctggcctggaaagtttttgctcagaaatccactgatagccttatggaggttcctgcagatgtaagaactttatttatcttgccgctttcaaaattatcttgtcttccattttttacattttgatggcaatatatctaggtgaaacctcttttagatggaaactaattgtaattctttgagcttcatgtacctagatgtccatcaatctgggaagagccccagatatgggaagttttcagccattatttctctgaattaactttctaccctttacctctctactttccttctataaatcctgtgtgaacattaactctcctgatggtgtcccataaatcctgtaaacttcccttgttaccttttcattctttatttttctcctctactggttattttcaaataatttatcctccagttgatgaattcctccttctatttgatcaagtctgctgctgatgctttctatttcacttttcatttcatgcactatattcttcacctccaaaatgtttgttttttttttaggatttctatttctttattgaatgtctccttttgtgtattaatgatttcattaggttgtctctctgttctctggtagcacactgaacttccttaaatcagtcgtttttaattttctgtaaggcaattaatgtatcccaatttcttgggagtcagtccctgaaaattattgtatttctcaggtgggtgctatgtttccttggtttttctgtttcttgttacaatgaattgaaatctgctcacttgatggagtgttaagtaggtagggtgcagcagctgtagcccagatgaggatataatggaatactcttcttgcagctccatcagctgaggtcagcagtggcaaacattacaaaggtccttggtggccaaggctgagtgtcctgatgctgtcgtgtaaatagagttgtgttaataatatccctttcagattgtttgtgattaatgtatagaaatgcaactgaaagctgggcgcagtggctcacgcctgtaatcccagcactttgggaggctgaggagggcagatcacaaggtcaggagatcgagaccatcctggctaacatggtgaaaccccatctctactaaaaatacaaaaacattagccaggcatagcagcgtgtgcctgtagtcccagctacttgggaggctgaagcaggagaatggcgtgaactcgggaggcagagcttgcagtgagccgagatcgcgccactacactctagcctgggcgacagaccaagactctgcctcaaaaaaaaaaaaaaaaaaaaagaaatgcaactgaattttgtgtactgacttactatcctgctactttgctgaattaatttattcagtttttgtggtgagttttcagggatttctacaaatatgatcatatctatgaacaaacataattttaattcttcctttctaaatgatgcctttatttcttttccatattctttggctagaaagccactactatgtttaatataatggctaaaatgcgcatcttgctttattcctgatcttagaggaaaagctcttagtcttttcaccattatgatgctccttgtgggtttttcttctaggagtctttttctttgtccttttatttttagtcaacatgtaataattgtagatatttatgggatatacacagtgatattgtgatacatgtatataatgtgtcataatcaaatcagggtaattagcatattcatcaactcaaatatcatttctctgttttgtgagcagtcaaaatcctccatctttctgtgcctaatttcatttaacatattatccaagttcatccatgttgctgtgaatgacaggacttaatgctttattatgactgaataatattccattgtgtatacataccacattctttctctgcatctgctgatggagatttaagttgattccatatcttaactgttgtgaacagtactgcaataaacatgagaatgcaaatatcttttttatatactgatttcctttcctttgagtcaatacccggtagtggattgtcaaactgtatgatagtctacttttagtttttttgacaaaacaccacagtattttccataatgactcactaatttatagtcccacaaatagtgtattatttcccttttctctgcatccttgccagcatttgttatgttttgtctttttgaaaacagccattctaactgaggtgaaataatgtctcactgtggctttgacttgcatttctgtgatgagagatgttgagcattttttcacatacctgttggccagttgttctattttgcacatttctaaatcagataatctggtgttttttgctgttgaattgtttgaattccttgtatattccggatattaatcccttgtcagatgaatattttctcccattctacaggatatctcttaatagtttattatttccttttatgtgtaggtttttagtttgatacagtcccatttgtctatttttgtttttgttgcctgtgcttataaagtcttacccataaaatcttcgctagacccatatcctgaagggtttcccttctgttttcttctagtactgtttgcttcaggtctcatgtttaagtctctaatcaattttgagttgatttttttatatgctgagagatagtatagtttcattcttctgcatatgatatcctgttttcccaacatgatgtgttcaacatggtgtcctttccccagagtgtgttcttggcacctttgtcaaaaaccagttgtctgtaaataaatttatttacttctgggttctctattctgttccattggtctatatgtctgttttatgcccattgcatgctaatttggttaccattgttttgtatacaagggggattgcttccgagaccccctgtatataccaaaagccatgtatattcaagtcccagagtcagccctgtgtaatgcgcatatacaaaatgtcagtcatctgtatacatagttttcacttttgtgaatattgcattctatccttgttagattatggggaaaatccacgtataaatgaacctatacagttcaaatctatgttgttgaagagtcgactgtattttgatgtcaggcagtgtagtgcctccagcttcattctgcctgctcagtattgtttgtcctatttgtggtcttttgtggttccatgcaagtttaaggattgtgtttttgctatttcggtgaagattgtctttggtatttttttttttttagatttctcttttctctctctctcccttttttttattatactttaagttctagggtacatgtgcacaacgtgcaggtttgttacatatgtatacatgtgccatgttggtgtgctgcactgattaccttgtcatttaccttaggtatatctcctaatgctttccctcccccctcccccctccccccccaccccacaacaggccctggtgggtgatgttccccttcctacgtccaagtgttctcattgttcagttcccacctacgagtgagaacatgcggtgtttggtttttcattcttgctatagtttgctgagaatgatggtttccagcttcatccatgtccctacaaaggacgtgaactcatcctttttttatggctgcatagtattccatggtgtgtatgtgccacattttcttaatccagtctatcattgatggacatttgggttggttccaagtctttgctatcgtgaatagtgctgcaataaacatacgtgtgcatgtgtctttatagcagcatgacttatagtcctttgggtatatacccagtaaggggatggctggatcaaatggtatttctagttctagatccttgaggaatcaccacactgtcttctacaatggttgaactagtttacagtcccaccaacagtgtaaaagcgttcctatttctccacatcttctccagcacctgttgtttcctgaatttttaatgattgccattctaactggtgtgagatggtatctcattgtggttttttgatttgcctttctctgatggccagtgatgatgagcattttttcatgtgtcttttggctgcataaatgtcttcttttgagaagtgtctgttcataacctttgcccactttttgatagggttgtttgttttttcttgtaaatttgtttgagttctttgtagattctggatattagccttttatcagatgagtagattgcaaaaaatttctcccattctgtaggttgcctattcactctgacggtagtttcttttgctgtgcagaagctctttagtttaattagatcccatttgtcaattttggcttttgttgccattgcttttggtgttttagacatgaagtccttgcccatgcctatgtcctgaatggtattgcctaggttttcttctagggtttttacggttttaggtctaacatgtaagtctttaatccatcttgaattaatttttgtataaggtgtaaggaagggatccagtttcagctttctacatatggctagccagttttcccagcaccatttattaaatagggaatcctttccccatttcttgtttctgtcagctttgtcaaagatcagatgattgtagatgtgtggtattatttctgagggctctgttctgttccattggtctatatctctgttttggtaccagtaccatgctgttttggtgactgtagccttgtagtatagtttgaagtcaggtagcgtgatgcctccagctttgttcttttggcttaggattgtcttggcaatgcgggctcttttttggttccatatgaactttaaagtagtttttttccaattctgtgaagaaagtcattggtagcttgatggggatggcattgaatttataaattaccttgggcagtatggccattttcatgatactgattctccctatccatgagcatggaatgttcttccatttgtttgtatcctcttttattttgttcagcagtggtttgtacttctccttgaagaggtccttcacatcccttgtaagttggattcctaggtattttattctctttgaagcaattgtgaatgggagttcactcatgatttggctctctgtttgtctgttattggtgtataagaatgcttgtgatgttttgcacattgattttgtatcctgagactttgttgaagttgcttatcagcttaaggagattttgggctgagatgatggggttttctaaatatacaatcatgtcatctgcaaacagggacaatttgacttcctcttttcctaattgaatatcctttctttctttctcccgcctgattgccttggccagaacttccaacactatgttgaataggagtggtgagagagggcatccctgtcttgtgccagttttcaaagggaatgcttccagtttttgctcattcagtatgatattggctgtgggtttgtcataaatagctcttattattttgagatacatcccatcaatacctaatttattgagagtttttagcatgaagggctgttgaattttgtcaaaggccttttctgcatctattgagataatcatgtggtttttgtctttggttctgtttatatgctggataatgtttattgatttgcatatgttgaaccagccttgcatcccagggatgaagcccacttgatcatggtggataagctttttgatgtgctgctggattcggtttgccagtattttattgaggatttttgcatcaatgttcatcagggatattggtctaaaattctctttttttgttgtgtctctgccaggctttggtatcaggatgatgctggcctcataaaatgagttagggaggattccctctttttctattgtttggaatagtttcagaaggcatagtaccagctcctccttgtacctctggtagaattcggctgtgaatccgtctggtcctggactttttttggttggtagactattaattattgcctaaatttcagagcctgttattggtcttttcagggattcaacttcttcctggtttagtcttggaagggtgtatgtctccaggaatttatccatttcttctagattttctagtttatttgcatagaggtgtttatagtattctctgatggtagtttgtatttctgtgggatcggtggtgatatcccctttatcattttttattgcatctatttgattcttctctcttctttattagtcttgctagaggcctatcaattttgttgatcttttcaaaaaaaccacctcctggattcattgattttttgaagggttttttgtgtctctatctccttcaattcttctctgatcttagttatttcttgccttctgctagcttttgaatgtgtttgctcttgcttctctagttcttttaattgtgatgttagggcatcaattttagatttttcctgctttctcttgtgggcatttagtgctataaatttccctctacacactgctttaaatgtgtcccagagattctggtatgttgtgtctttgttctcattggtttcaaagaacatctttatttctctgccttcatttcgttatgtacccagtagtcattcaggagcaggtggttcagtttccatgtcgttgagcggttttgagtgagtttcttaatcctgagttctagtttgattgcactgtggtctgagagacagtttgttatagtttctgttcttttacatttgctgaggagtgctttacttccaattatgtggtcaattttggaataagtgcgatgtgatgctgagaagaatgtatattctgttgatttgggttggaatgttctgtagatgtctattaggtccacttggtgcagagctgagttcaattcctggatatccttgttaacttccggtcttgttgatttgtctaatgttaacagtggggtgttaaagtctcccattattattgtgtgggagtctgtctctttgtagatctctaaggacttgctttatgaatctgggtgctcctgtattgggtgcatatatatttaagatagttagctcttcttgttgaattgatccctttaccattatgtaatgaccttgtctcttttgatctttattggtttaaagtctgttttatcagagactaggattgcaacccctgcctttttttattttccatttgcttggtagatcttcctccatccctttattttgagcctatgtgtgtctctgcacgtgagatgggtctcctgaatacagcacactgatgggtcttgactctttatccaatttgccagtctgtgtcttttaattggagcctttagcctatttacatttaaggttaatattgttatgtgtgaatttgatccattatgatgttagctggttattttgctcgttagttgatgcagtttcttcctagcatctatggtctttacaatttgtcatgtttttgcagtggctggtaccaattgttcctttccatgtttagtgcttccttcaggagctcttgtagggcaggcctggtggttataacatctctcagcatttgcttgtctataaaggattttatttctccttcacttatgaagcttagtttggctggatatgaaattctgggttgaaaattcttttctttaagaatgttgaatattggcccccactctcttctggcttgtagagtttctgctgagagatccgccgttagtctgatgggtttccctttgtgggtaacccaacctttctctctggctgcccttaacattttttccttcatttcaactttggtgaatctgacaattatgtgtcttggagttgctcttcttgaggagtatctttgtggcattctctgtatttcctgaatttgaatgttggcctgccttgctaggttggggaagttctcctggataatatcctgccttgctaggttggggaagttctcctggataatatcctgaagagtgttttccaacttggttccattctccctgtcattttcatgtacaccagtcagatgtagatttggtcttttcacatagtcccatatttcttggaggctttgttcgtttgtttttactcttttttctctgaacttctcttctcacttcatttcattcatttgatcttcaatcaccgatatcctttcttccagttgatcaaatcggctactgaagcttgtgcatttgtcacgtagttcttgtgccatggttttctgctccatcatgtcatttaaggacttctctacactggttattctagttagccattcgtctaatcttttttcaaggtttttagcttctttgctttgggttcgaacttcctcctttagctcggagaagtttgattgtctgaagccttcctctctcaacttgtcaaagtcattctccgtccagctttgttccattgctggcgagtggctgcgttcctttggatggggagaggtgctctgagttttagaattttctgcttttctgctgttttttccccatctttgtggttttatctacctttggtctttgatgatggtgacgtatagatggagttttggtgtggatgtcctttctgtttgttagttttccttctaacagtcaggaccctcagctgcaggtctgttggagtttgctggaggtccactccagaccctgtttgcctgggtatcagcagcagaggctgcagaacagcgaatactgctgaacaccaaatgttgctgcctgattgttcctctggaagcttcgtctcagaggagtacccagccgtgtgaggtgtcagtctgcccctactggggagtgcctcccagttaggctactcgggggtcagggacccacttgaggaggcagtctatccattcttagatctcaaactccgtgctgggagaaccactactcttttcaaagctgtgagacagggacatttaagtctgcagaggtttctgctgccttttgttcggctatgctctgtccccagaggtggagtctacagaggcaggcaggcctccttgagctgtggtggactccacccagttcgagcttcctggccactttgtttacctactcaagcctcagcaatggcaggctcccccagcctcgctgccgccttgcagttcgatctcagactgctgtgctagcaatgagcgaggctccatgggcgtgggaccctccgagccaggcgcgggatataatctcctggtgtgccgtttgctaagaccattggaaaagcacagtattagggtgggagtgatccagttttccaggtgccgtctgtcaccccttccgttggctaggaaagggaattccctgaccccttgtgcttcccaggtgaggcgatgcctcgccctacttcgtctcacactcagtgggctgcacccactgtcctgtacccactgtcttgacgagccccagtgagatgaacccactacctcagttggaaatgcagaaatcacccatcttctgcgtcactcacgctgggagctatagactggagctcctcctattcggccatcttggaaccaccccacttactgcaatctttaactcccaggctcaagtcattctccatccttgacccctcaagtagctgggactacaggcatgcaccaccatgcctggataacttcttaattttttgtagagacagggtcgtgcattgttgcccaggctggtcttgaattcctgggctcaagcgatccttctgccttggccccccaaagcactgggatttccttttttttttttttttgaccgatacataatacttatggggtacatgtgctattgttacatgcatcgaatgtgtaatgatcaagtcagggtatccatcaccctcaatttatcatctctatagttaggaacatttcaagtcctcttttttattttgaaatatacattatattgttaaatatagtcaaccaactcttatcaaacattataaattatttattctaactagctgtgtatttttacccactaaccaacctctcttcaccctccagacatacctttcacagcctttggtatctatccttctactctctacctccatgagatcaacttttatagctcccacatatgataataacataagataattatctttctgtgcctggcttaaaataatgacctccagctccattcatgttgctgcaaaggacatgatttcattcttctttggtcaattagtattccattgtatatatttacctcattttctttttccatttatccactgatgtacacttaggttcctgagtccatatctttgctgttgtgaatagtgctgcaataaacacggggatgcaggtacatttttagtatactgatatcttttcctttagataaatatccagtagtgagattgctggattatgtcatatttctctttttaggtttttcagaaatcaaactgttttctatagtattaatttacattcccaccaacagtgtataagagttccctccacatcctctccagcattggttaatttttgtctttttaaaatagccattctcactatggttttggcttgcatttcccttataattactgatgttgggcttttttttttaaatatacctgttggctacttgtatgttttcttttgagaaatatctatccatgtcttttgctcactttttattggaattaatttgttgtttactattgagttattggagttcctagtatattctggtattagtaccttgtcagatgagtagtttgcaaatattttctcccattcaacaggctgtctcttcactctggtgattgtttcccttgttgtgtacaagctttatcatttaatatagtcccatttgtctatttttgtttttgtctgtgtttttgaggtcttatccataaaatctttccctagaccaatgtcctaaagtgtttccccaatgtctccttcattaatagtgatgttatagtttcatgcctcatgtttaagtctttaacccatcttgagttgattttagtatagcaagagatagaaacggtttcatttttcacatggatatcttattttcccagctccattaagtgaagagggtgctcttttcccagtgtatgttcttggcatctttgtcaaaaatcagttggctgtaaatacatggatttacttccaggttctactctgttccattggtctatcagtttttattccaataccatgctgcttttaatgctatagccttatatttttaaatcaggcagtgtgatgcatccaactttgttatttttgctcagaattgctgtggctattccagctcttttttggttccatctgaattttaggattttttctatttccatgaaaaatggcattggtattttgagagagactgcattgaatctgtagattgctttgggtagtatggtcattttaattttgttaattctcccaatccatgagaatgggatgttttttgtgtgttcttttcaatttctttcatcagacttttgtagttttccttgttagaggtttctcacctctttggttaaactcattcctagattttttgtagtggttgtaaaagataatgccttcttgatttctttctcagctggttctttattggtatatagaaataagcctgatttttaaatcctgtaactgtaatcaatttattgatcagactgaagagttttgatttttgtatttcatggtatgagttgtaatatcccctttttcatttttgattttattcatgtaggtcttctctcttttcttcttggatagtttagccactggttattttgtttcttttcaaaaaccgattttgcatttcattgatcctttatatttatttagtttcttgtttagttctgctctgatcttcgttatttctttccttctactaattttatgtttagtatggtttgttcttgcttttctggttccttcaggtgtatcattagattatttaagatcttttctaccttttttaatggaggcatttattacaataaactttcctcttagcattgcttttgcagtatcccttaagtttcagaatgttgtgcttctattttcacttgtttcagtaaattttttatttctgccttaatttcttctttgacccattggtcattcaggaacatgttaatttccatttatttatacagttttgaatgctcctcttatttatttatagttttatgctattgtggtctgagaagatatgtgatatgaatccaatttaaaatatatatatatttaaaatcatacttagtgtcctaacatataatgtatcctggagagtgttccatgtactgatgagaagagtgtatattctgcagctgttttatgaactggtctgtaaatgtctgttaggtccatttggtataaagtgcagtttaaatccaatgtttctttgttaattttttgtctagatgatctgtctaatactggaaatggagaattgaagttcccaagattattgtgttgaagtctacctttcccttcagatttgatgtttgccttatatatctgggtgctttggtgttgggtgcatatatgtttagaattgttatatcctcttggtcaattgatccctctgtcactatataatgacttcgtctctttttagtgtttttagcttaacctttgttttatctgatgaaagtatagctactcctgtttggtttttgtttccttttgcatgtaatatcttttcccattcctttctttcaactatgtgtctttacaggtgagatgcgtttcttgtagatagcatttagatgggtcatgtttttaagtccattcagccagtctgtcttttaagtagaaagtttaatctatttatatgcaaggttattgttgatatgtgagggcttattcctgtcattaattgatttctgattattttgtgtgctttcatgaagttgtcctttcacttcttcctgtaagactcccttaagcattttttgtagtgccagtgtagtggcaattaattccctgagcttttacttttaagggaaatactttatttctccttcatttctgacgaatataactttgctaagtacagtattcctggctggcaggtttttggttttgttttttctttcagcactctgcgtatataatcccatcctcctggcctgtaaagtttctgctgaaaaatctgttagtctgcaggttgttcccttgtaagtgtctacaacctcttttatcgctggttttatgattctctctttgtcttgggatgggcaatttgctataatgtgctgtggaaaagacctttctgaattgtatctatttagggttctgagattcctatatttggatctaaatctcttgggagattgggaagtgttcaggtattatttcattaaataggttttataatcttttggtttgctcttcaccttctgggacactgaaggtgtcaccttatggcatcctatagtcacatagcctttgttcattcttttctattttttctatatttttgtctgagtcatttcaaaagacttatcttcaaggtgtgaaattctttcttctgcttgttgtggtctgttattgaagctttcaaatatgttttttatttcattcaatctattattcaattccagaatatctgtttggttctttttatatctatctcttgggcaaatttctcattcataccccgaattgttttttctgatttctttgtatagtctatcagatcttctttaatattatattgaatttttcaaggtttcatcaatttctttttcactggaatctgttggagaattattgcattccttaggagttgtcatgttttgccttttcatgtttcttgtgtgcttacactggtatctgcacatctggtgtaacagtagtttcttccaattttttgatctgtctttcctaagagagtcttgttcctgaagatatatctatggtgttctttgggcagggcactttggttttgattctgggtgcctgcagtagtgtgatctccatggaatttttttcagctgtaaacagcaccagtagtgtctgggagttcctctgtagtttaggatgcagttgttggtggaggctgtggtaaagtctggctggggatagggacaccagctgggccagtcctcaggccccagtggcagcagtggctggccccgaatgcttatccttgggcccaatggtagtgtatgctggtaccagtgttagcaagtccagggaaaccaattttgggcctccaggcaacttgctcaggtgccaatgatgacagagctgggccacagggtgggtaggtccttgagctctgagcagcagatatggcttgggcaatggcagtagcagtggcagaacaatcttctgcctcccaaggtgtccatgctggtattgggatggctgggataagctggatgagcttgtcccaaggcccacaggtggcaaattcaagtgaatgccagttgtggtggtaatggtcagttgggtagggcagtcctcaagcccccaggagtgctcaggtgccaacaatactggatagggcagggtgatccctaggcccagagatggtatgcgctggcactgggagaaaagagggtgggaccaggccaggtgggcctgtcctgaggccctccagtaatgcaagaatgtactgactgtggtaggcaggcacaggaagatccctgtataccctgctgaatgctcatgttggggcagcagcaactctattgcagccctactcctggggaagttgagtgggattgctttcagtggcagcagctataaacaggcagttgggcaatgcatgcttcggccccaggtggtgactatgggcagggtcacctttcctcatggcagccttgcttcggaggtagcagagtattgccaatggctcatgctttggcctggagggagcagtcaggagtggcaaccagctttgtgtaagggatgtccatggggctccagggatgagatagagggatgtggggcccacagcagatgcagtctggtgggggttgggctatcaaaatgggactttcctgaagttgcctgaggattcaggggatgtgtgaattgcctgaggattcagggtgatctccctctctgggagctgttcattgccatttcacagtctgtaggtagcctcttgttagtctcaaggcatctatgggtcagggggttctctgactaggatttcaggagtctgctgtgggaatgtggaccactaggggctcacttacttacctttctgcacatcgaggagtctcttcatgatcccagccagtcccatagaagcagactgcctgactcccctcttatcccttgcattgggtttttcttattacttctcagttgaattccagcattctctcagaggcgatctatataaactgtggttacctacttgctatattttgtggaggaggtgagtgccagatgcctctagtcagccatcttgaagcccctgctgatatctggatagggatttcatagcatctgtatattgctataggtaaatatgatcattttaacatttttctttcaatccatgagcatgggatgtctcaaaaaattttgtagcctcttcaattactgttatcagtattttatagttttcattgtggaaatctttcacctccttggttaagctttgcttttttttgtagctattgcaaatgggattgctttcttcatttctcttttggctaatttgctgtttcacagaaatgctactgattttttgggggaggcaggggagtgcagacagggtctcactctgttgcccaggctggggtgcaatggtgcaatttctgctcactgcaaccttcacctccgaggttcaagtgatcctcccatctcagcctcctgagtagctgaacttcaggtgcaggccaccacgcccagctcatttttgtactgatgaggttttgccatgttgcccaggacagtctcaaactcctgggctcaagcaatccacccgcctcatcctttcaaagtgctgaaattacaagcatgagccatcatgtccacacctactaatttttgtttgttgatttttttatcctgcaactttattgaattcctttaccagttctaaaagattttggtggaatctttaggtttttctatgtataagattatgccatctgcaaaggacaatatgacattctcttttccaatttggataccctttttcttttacttgcctaattgttctggtgaggacttttcttactctgctgaataagaatagtgaaagtgggcatccttgtcttgttctagttctaagagagaaggtgtttagcttttccccaggtggctgtgggtttgtcatatatgaccttcattgagttatgttccttctagacattatgtgatgagcttttttttttatcatgaagagattttgaattttatcagatgctttttctgcatctattgagatgatcatgtatttttttgtccttccttctgttaatgtgatgtatcacatttattgatttgtatatgttgaaccatccttgaatccctgggataaatcccacttgattatggtgtattatctttttgatgtgcgattggattcagattgctagtttgtgtgtctgtgtgtgtgttttgtttctgaggattctgcatctatgttcatcagggagattggcctgtagttttcttttttgctgttattgtgtccttatctggttttggtatcaagatactgcttgcctcacagaatgagttagggagaattcctttctcttcagtcttttggaattgtctgagaagaattcatgttagttctttaaaggtttggtagaattcagtagaaaacccgtgcaatcctgaggttttctttactgggagactttattactgatacaatctcattccttgttattgctctgttcagattttttttcttcctggttcaatcttgggaggttatatatgtccaggaatttatctctttcctctaggttttctaattgttgacatatagttgttcataatggtctctaataatcttttgtatttctgtggtgtccattgtaagtctcctttttcatttctgattttatttattgggtcttcttggttagtctagctaatggtttattgattttctcttttcaaaaaatcagttttttggctgggtttgttggctcacacctgtaaacccagtactttggaaggccaaggcaggccgatcgcttgagtccaggagtttgagaccagcctgagcaacatggcaaacccccatctctaccaaaaaaaaaaaaaaaaattagcgaggtgtggtgctgcacatctactcagaagctgaggcaggaggattgcttgagcccaggaagcagaggttacagtgagccaagatcacaccactgcgctctagcctgggtgacagagtgagaccgtgtctcggggggtgggggggaggcctcatttcattgatcttttgtcttttttaccttttatctctatttcatttagatctgctctgatctttactatttatttccttctaattttaggtttgatttgttcttgcttttctagttccttgagatgcgtttattaggttatttgtttaaaaactttctaccttattgatgtgggtgtttattgaaataaatgtccctcatagcacttcttttgttgtaccctatacatttttgtatgctgtgtttctattttcatttgtttcaaagaatttttaaatttttaaaatcaatttcttcatagacacagtggtcattcaggaacatgtagtttgatttccgtgtatctgttcaatttcagaagttcctcttgttattgatttccagttttattccattgtggtctgagaagatacttgataagattttgacttttaaaaatttattgagacccgttttgtgtcctaacatatggtatatcctggagaatgtgctgtgtgctaacgaagcagcagttcaaatctaatatttccttgttgatatttttccatccaaatgaattgtccaatgctgagtatgaaatgttgccatccctaactattattgtattggggtctatctctttagcactaataatatttgtttaatatacctgggtactccagtgttgttggttgcatatataattgttatatcttcttgctgaattgatccatttataattatataatgacctcctttgtctcttttttctttttctttttttttttttttttttttttgactcagtattttttgtctgtctactcctgcatgcttttggtgtctgtttgtgtggaatatctttttctatccattcccttacagtctatgggtgtctttacaggtgaagtcagtttcttataggcagcatgtaattgggttttatttttttaattcatttagccagtatctatctttcatttgggaaatttaaattacctacattcaagattgttatcaataggtgaggacttactcctgtcattttattgttttctgactgatttgtatacttttgtttcctctcattgtttttctttgcaattttttggttttctgtagtgataatcttttattccttttcctttctcatttgtgtatctgctctactagtgttttatgcttttgtagtttcatgatggtagatatcatcctcctacttccagatgtagtactcccttaagcatttcttgtggggctgatttagtagtaatgaattccctcagtttttgcttgtctgagggaggcaaaatttcttccctcattctgcttcatttctgaaggatagctttgctgggtatagtatttgtggctagcaattttgtgagcttttccccaccttgcagcacttttaatatggcattcaattctttcctggcctagaaggtttctgctgaaaaatctgttaatctgctgttgattcccttatatgtgacttcatgcttctctcttgttttttaaattctctctttgatttttgacagtttgatgaaaatgtgcctcagagaggcccttttagggttgaatctatttagggatttgtgagcttcctttatctgttagtctctttctctcccaaactttggcagttttcaggtattatcttcttaaatagattttctggtccttatcccaacacttcttctggaactcccaaaatgtgaaatattgttagcttaatagtgtctcatatgtcacgcaggcattcttcattcttttttattgttattttttaaatctgtctggtttattgcaaaacacctgtcttcaaatttagaaattatttcttctgcttgacttagccggcttttgaagctttcaattgtattttttatttcattcatttaatttatcacctccaggatttttgtttggttctttttcatatctaactctgctggatttcccatttagataatgaattgttttcctgatatgtttgtattgtctatttgtgttctcttgtatctcattgggtttccttaagatttcctttactttggagtctattattggagaattattgtgttcttttggcaagtcatgttttcttgtttttttccccccaagttttttgtgtccccaagttgatatctgcatatctggaataacagagacttccaattttatggagtagccttagtaaggacttttcctgtacacgcgtctgtagtatcatttgggtagggtgctttggctttggttctggttcagtgcagaagtgtggtgtctctacaattaattagactataatccacatcagtggtatctgcaagttcatcagtggcttaggctgcttggtgcttaggatgtctgtgaaggcaagaaggctccttagaggtacttactcctctatttttgctgatgttgctaactaccttcaaactttttgacaaagcattttaagcctcttctctgattctgtatgcagttttgcagtgctgggcaggggactagaatgctattggaatttggctcactttgctacccacaggcaatttgaaggtattctttctcctaatactgctaacagcatgggtcatgtggttttatttgcacttactgattttatgcttttaggggaggatgagtgagatgatttatagtcagaggggatgaggagcagcatgctatttttctccaagcctggctgaaagtcttttttaaattatccttttttcttagtacccctttctaatctatcagtatgtcttatcaactctctggatttgcccacacctagtctctccagctatctccctggttaaaaccaccaccatttctctgcctacattgttgtccatacctcattactggtctcttgatttccactcttgcttcctgtactccattcttcacataacagctcaagggagttctttaaatgtacagtggatcttgctgcttccctactcaaatgttccgacagcttcctgtcaccctgtcttgtgtcagtctcacagcacacacagcttaattcaggaattaagctgtgctggtcacttattgagaaagagcttcatggtgggcagctgggaagctgcacagaacactcctcagagttctacaagcggctgagagagctggggtatttatctttcactagtgagtgctgccccggtggtggctcactttccattccttttggcctgccctgtgtgcagctcagcaagtgcctgaagtcagaggtagtgcttatgaaagtatctggtgggcttgcattaagaagctgtcagtgtgaagaacgtgaatgctaagggcatatgagtgtgtccctgagaacatggatattgtgttctttacctccatgtctccagtgcctgccacatagcaggtcctccaagatttgctgatctgcctgccccacctggggtctctgtctctcccacagctcactgacattagccacgtggccctctgtttcctgtaataggccatttcctaagtaagcatcatcctcatttctatacgttttctctgattactggaaattcctcaagtgttgaccattttgattcctgggccccttaagagtccattagcattggaatggagcccacaggaccataccagacagatgccaccacatcttttcttgaagtagtgttcaggctgagggggtcatagccgagggtccctctggggccgcttgctctcctcctactcacagccctcctgcagccagcagcagtgggggagccaagctgagttgattacttttgacatcagttgttaacataattttgatgttgagcctccccccagttctggggtggctctgactgtgtccaggctccaatttgagaagctatggggagcctctcggccccagttctggcctggctgggaggtggcctgggaagggacctgtgtttctcaagcccgcgccctcggggcctgggggtggggccccagcagatgtctggatttggtagccagggcctggagccggatgctgagaatgaggcctgcaactcatttccccattaaacattctgagaacatctgcaccggtttccaaggcttctccctcactaattgctttgattattgtgtgaagttaagaactggcacatttccgcgatgttgtgatgaaggtgaaaagatcgctcttaattagattaaaaacatttttttcttcctgtgtaattttgtcttgaaaatcaaggccacttttttgttttctccatccaaagacctccagaaactttcctccccacctctccagaggtttctggggaatgtcctgtgagctcaactcttggagaagatagtgcttaacccagattccattgtatattaaagtttcctagggctgctcttgctgcctggaaccttcccctgaaaatgtgtcttgggagacctagacagtgacttcctgcagcatggagacccgggtgggtcgattttagttgtgtgggtggctgtgttgctctctttccgtttcctgggctcactcacgctcagggttgaccctgtcctggctctgtcactgcctgtcttcctcagcgcccccgctactcagaccccacccttgggcctgcagagacatttccgttcactctgagatttgtgtatgctgaggcttgctatacttattctaaggagaagtgtttggggtgtggggtgtggtcctcagtatcctaaacttaggttttggaaagcccagcatcctccctgggacttctcaggattccggaagtcatctttgactgtgtcacatcactgtcatgcttgaggcaaatctattctgcacacctttgatccaatgtgagatccaacatgttccataatttgcatcaaacatcctcatacagcagggtgtggagagaggctcactgaaggtttggggagatgaggacttgcatcacagcagtagaaagccaatgtcccaccttaggaaatccctttccaagagttccctgtgctgttgcagggctagggccagggccttggcctcaggccagcttctttcccacaagccttctccctgccctctgccctgaaaactagtgggggcagtgcagaccagtttagctattttgtaaccttgactgcccccaggcccatgtccgtaggctcacacctcacccccaactttgtcatgcacattcctgaagactctcttggtaacaaatgatggaaccccaactcaaacaagcttaagcacaaaagggacattttttggctcacacagctggacccagctgtttcagacacagctggaccccagagctgagatgatcttgctcacttgctctcactctcccctcttgcactccccttctcccttcccgttccctcttttgttctccctttcccttgctctctatccattggccccatgggatggctgtatccttaggcagctactttctaaaaggggcaaaatggccaccagcttgcattcaacagctcaggaagcccagcagaacgaggtcatctcttccaggattcctgccagaatctaaggccaggttcttattggcctcagctggggtacaagccatccttggacctgcagctgtacctccgatggctgaggcaaggtccacagggacccctttggggatggccagagggtacctaaacactgcacactaggagtgggaaaggaagagccccctaaggaagatttgagaagctgttcccagaagccaggcctggctgctggcaggcaaaaacaacaggtgtccactcaagcaaggtattttcctaagcggaactgggtgccagctgtgaatatacattttcactccattcctcgccttgttcctggcagctgttgtgggaatggcttttacactttccatccatgtcccttacttctcgcctctgagtggagacacaggtggtggcggggccactctggctcagggtctatgagccgggcatgggcagctggcacaggctgtggggctgcggctcagcaatgtcacgcagggcctggctgcagctgtccggatgcccctggggagggcttctccttcacagtgcaggatccgcagggctttggtgaatccactgagagggggagatttcttgagggggccagggagggggcttctacttgcaaaggatagggagagcttctgttcatccttgtgaagtaggctggctcagggaactcgcctgtgccaaaccctggggagacatgggtgaggcagaaggcaaggttcccgtgctgagcgccaggcacacataagccctgcagccgtacaggggagggggcaatctccggagccctggaaagcttgtggaagagggcttgggttacacctgggagattaggccggattttaatcaatcaggaggggaagggcagggggtgagtggttgggtgaagttactaggaagggcccagacactggcgagagtctcttgagggcagagggcagcagagatgggctggagctttgagctttgtcataggctggacttggggcttgaatgctgacctaatctgggcagggaggggtctggggctcgatgagaaggcagaggaagtgagaccagaatttcttgggaacagaaagcctcaaagactttcatgataggagagctctatgtagcctcatgggcagctccaggccaggtggagggacatattctggcaactctaggataagatgtgcaaggtcgtgggccagagagcaaggcacagatacaggagacttccacaaattattgtttcttgacttggaaaagtatcatgcaaaatagaaaacacagacacaataaggaaggaaatgaaaatcacccaaagacaaagttaacatttggatctgtttccttctagtcttttttctgtgcctgtatttttaaaaaaataaaattcaaatccccctatcgagcaggaccactgactagaaaggaggatgctgtgctgagtttgattcctgttctcttgagagggtgagacttggcagccagcgtccccagctggggtagtcgccacgcccgaggctgcctttgccatcccagacctcccactttcctagaaaacaaaattgttttgttctgccctgaaaatttaggcccagatcctggccttgacaaagcaaaggcagccaaagaattaaagcatcaaaaaccaggactgtcttaggaaagtgtgacttcattgtcaccaggatgctgtgctctttgtccccagggccagccactctaggcagttcagcaaagggcacctggcattgctccggtacctcctgcagagcctggatatccagatgaactgccctttcaagtacaccatgggctcaaccttctctgcagctgtgagttcaggctgtgaaatacccacttcagaggtgggggtgacaagcaagacctgttagggcacagcacttgccctcaagccctggcctgaaagaggcagcaccagtgtgtctggaaagagctgaatccccacccacccacccccagctcccctccatgctctcctagatgcctgacctggctacgaccacaggtgaaaacagggaagaggtggcagctctggtcactgcctccctgtggtggagaaagcacgccccacagtctccaacacacaagccagcagacaataacctctcctcttgaattggaaaaacaaatctgtggaggccttctctgccccttgttataggggccccatatgccgttcccaggattaaaccaaaaagcacacattcctctctggcaggtgcaggtcccacccactctgggcagccaactgatgtgcacattttaatttcctaaaacaccaggacagaaccttcctcaggggtcaggtggctcacccttggccctcaggctttggagatgggcacttgtcatcatgggtgtttggaaagcaactctacgttctagcctgtgctccatcgttccttctacatacaagtgatgcaaacatcaaaatatgttttttctttcttccttcctttaaaaaaaattgaatcctggatgaagttttagctctgtcacttgacaactgcattatataacctagggtacttgaatctcagccccaaatctctaaaatgggggcagtaacatgcttctgccaggtcccagacctgtgggtctccaaatctgcacattcttcaagccttacaggtccttccctggtctctctaaggatgtcatgggcacagagccctttcactctgagcccttctcctggctgtgactaagtaatgtctgtgtggtttcctgctggaagtctgccactcgcccccacgggccatgagctcctgagtttatttacatttccctgattgctagtcaggcgcaacacctttccacatgctcatcagccttttggattcctcttttgtgatgtgctactttgtctattgcccattttctattaagtcatttatatttttcctattgatttgtaggagtcctttgcattttgtgggcactgtcttttcactctttaaggtgtattttgatgattgggtcttaactctaatgtcaaattactcagtcttctctctcatggttattgcttcttttaaaaaaaaccatcctaatgctgatgtcattaagatattcttctatattcagtcatgtgacctttatagttatgcttttcatagttaggtcttcaatcccctagaatgacaagaatgaatttttggtatatgatgtgaggtaattaagggtccaacttaatgtttttccagtgtgggtatccaactgctcctgaacatttgattgaaaagtccatgctcttcccaggatgtgcaggccacctctgatacacagcaagcttccatatttgtgtgggctgtttcccaatgctcaatcctgtcccattggcctatttgtctctccctgtgtcaataccacattgccctaatgaccactgccttggaagaagtactgatgtttggtacagcaagttctcccaccttgttcttcttcaagaatattgccaattcttggctttttgcacttccaagtcgcagttagaatcagcttgccaaagttctcacacagaagccttgagatttttattaagatttggagagatttattcagattttgagataatcttttcagtattgagtcttctagtcattggaatgaaggcatatttctccatttatatcttcttcattgtctcttactaaagttttacaattttctccagagttcttgcatatacttagttagataattaatattcttttgtgctattgtatacaggttctgttttctcttgttacctcacattttttatttacagaagagaaacaaaaatagtaccgagtacccacatccctttcaccagcttcccctaatgttagcatcttatataaccatggtacattgaccaaaactaaaaaattaacattggtacactattaagctagagttataaatttatttggatttccccagtttaactactaatgtcctttttctgttccaagatcccatctaggatcgatcattacatttattgtcatctctgatcggtgacgggcttctcagtcttgttcttcattaacttgacacttttgaagaataccagtcaggtgtcattgtccctcagtttggatttgtctggtgttttctcaggactagaccagggttataggtttaggggaaggaggccagtgaggtgagatgctttcctcattgtggaacatgacatcaacatggtttatcactggtaatattaaccttgagccactcgtttaaagtggtgtcggccaggctcctccactgtaagtgaatagctgtttttccctttccatagcttagtctttagaagcgagtcactaagtatagcccacactcaaggtggggaagggaggggttcaactctacctcctgcaggagagtatcaaaaaaaatctgcaaatatgttaaaactaccacagcaattaaaatacatttcaaggaagaaactgtgaagtttctgagtttcactaactaatttcagcattcattcatggatcgttttcctgcagcaaatattaccgtgatgtacttctattttcctcattccttctacattttttatttggaattcctttataaggaagatttgtccctctcctccaattgtttatttaattttatcagtgtggatttgggagtatttattttttgagttatagtccaatattatttattttgttgctcaaattgttcaagctgtggccactggtgggttcatgtgtccttttgatgtgccccccgccatccttttcatttatttttaagcatttcttttctagcacttgacaatacttcaggctcatcttttattttccctaccctagccctagaatcatccattcatccagagagccctggctccctggagaatgaatagaaaacctggatctaggcacggggtatgctcgtggctactagggtatcattgcttcagtctcctctcagtggacagagctaggaaatatatgtatgtatgtaacctgagtacacatacatctttacatatctgtatctatataaagctaaccatgagttcatactgacatttctgaccagagttcatccttgccccctcccccacaacttatttatagctttttctctgacagctagaaacctggctcccattacctacagttcatttacttatttgtgtaaccctattgtacacgtagtaccctatgtgaagcaaatttacctactagattagagtgtttaggacagacttttgctttaaccatagagtgtccagtcaaaacagtgtttttgaaagcaacatatgccagctcctcctcctcctttcctttcactgctatgtcatttgtttgtaacacgctcatcatagtctgcttttcatcgtagggtcctccaacatccgggttaattttttaaatttgcatacagtaaaatccactctttgagattcagttctgtgggttttgacagatgtctggagtcatgtgtccacaatccagtatcattcacagaagttccatacccctaaaaataccctggggtgagtcttttgaagtcaagtacttctcccctaaccactggcagctattgatctgttttatgtccctgtagttttgtttttctagaatgtcctataaatgggatcctataatatgtattcttttgcatctggcttctttcactgcttagcaaaatgcatttgagattcatccatgttgttgcataaatcattagttaatttctttttattgctgggtggtattccattgcatgaatatatacattttgtttatgcattcacctgttgaaggacatcttcattgtttccagtatttggtaattatgagcagagttactatacacatttatgtacaggtttttgcgaacataaaaattcaattcacttgggtgggaaaggaaccgataggtcatgtggtatgtgtatgtttaacttaataagaaattgctaaactatttcctaaagtcactgtgccattttgcattcccaccagtaacatatgagagttctacatgttccacatcctcaagagtggttggtattgtcaggttttgaattttttttttaatttatggaatttcattgtgattctaatttgcatttccatatttatgttaattatgtatcttttcatgtgcttatttataatccatttttaaaattggattgttcactttattgtcaagttgtaagcattctttatatattctgagtgcaagtccttgacctgataggtgatatgcaaatattctttccaagtctgtgctttgtcttttcattccattagcagtgtctgttgcacagcaaaagcttttaattttgataaagtccaatttgttgattctttttctcttacgagttaaacttttggtttcgtatttcagaattcactgccaaatccaaggtcctggagattttctcttatgttttcttcaagatattttatggttttatgttttattttagattttttttcagtaagtttgtatgtagtaccctttaaattttcattttctaattgttgatcatctgtcctatcaggcatagatactaaatgcattaaaacttttacacacatacatatgtatacatacaacacattcaaatagtgaaattaggaataaatttaagagagaattgtattacgctgatgtgggaaaaccttccttttttataaagcaaaagatgtatcactttaaaaacataaaacattttctaggataaaagcaacataattcaggtgaaaaaacagactggggaagctatctatgcctcatataacaaggagttaatgtctgtaatgtatagaaaattcctacaaagtgataagcaaaagtgagcaaaggacatgaacaggcaattctgcaagaggaaacccaaacagatgccaagcccataaaaggtattcaacacagatggaaataacagcaatgcctcagttttcatccatgcttgatagtccctgcaaaaggtgctgacaaccttcattcgggcttcattcaacacttcattcaggcatggatgtgggaaagctgggggagcctgaattgctacaacttcttgggaaagcaatctagcaacatttattaaaattactaaggacacaccctctcaccctgctccagtatgtcagcttttaagaataaagatgaatatggcatcatagtctgaataattaagcagcttaaaactataagagcctgaatgtccatgatatacagaatggttagctgtggccaatctaaactgtggactattatgtaatgactaaaataattaaatccatgcctatatacctagagaaaaatgaaatgagcttatgttacagagtgacaggaacagagtcacagtgacatcccatgtgcataaaagcaactcccacctggcatctgctgctcggatgagcagagagggtgggctagggatctagttggcagttaacactgatgaccttgggggaggaaagccattgtgaatctttgaattattccacttctcacagatgagtacttaatccttttgcaataaaatatttaaatgaagacaaatataagccaagagcaaatactgatagtgtcaacagagagtggggagtgataaggatcagtatcctgagctcctgtgtcaaagttgcagaggtgggcccaggaatcataatgtgaagccagctgttggagggactcctgtgcctcattgggggtacaactggttgatgtagcatcgtgttttgaggaaggagttctgtggctgcccccacctcccaggcttgccattcctcatgggtcagaggtcctatcaccccatctttcctgacccactactctgtcaatgtatgagtgtgacaatgtatggtggtgggagctgttgtcccttaccaggcctgtgcctgtcacctctgttttattcttgacccaagtgtcagttgtgaacatgggaagaggcccagaacctgaggtggggagagtcttggacacctgagcacagccccaggcacagttaccactccgaagatgattcactggcctttattctcctcagacactgaggtgtcaggcactttggggccatcttaaacacccacccaccccaacacccaactataaaactgattgtcagggctggagcttccaggcacaagctccactcctcacctggccctgggagctcacaggcctggctccacagcactggcaggttgggtgggaggcctaacgtgctgtccccacactttctcctcagtaaggaagagcccaacactgctggaagtgagcatgccccatttcatgagaaccaacagcttcgccgaggacctggacctggaaggggagactctgctgacacccatcacccacatctcacagtgagtgcctacatgtgcgtgaagggctgggctggaggggactggagctcaaggagtcagacttggtgctggggaagccttgctctctggccagagtgctatctactcgcctagtgcccaccacttgccgtctgcctggccccaacacggaggcaccaggcaagagaggagagcaagggcacttcccactgagcctgggaacatgatcctcttgttttgacttatggaaaaccagactgatcattttccacttgttttcatgctttgagagtctgagattgtttttctctcccccagccccctcccctgccccccaaaaaagagacgactttgttttttagcatttccccatggaaccctggccaaagccatggggcagatgccgggtgcagtctgccagttgctgctgctgtcctcaggggctccttcaggtggaggaaatggctgattttccacgccttccagttggccttcccctgaggcacagctggcctgggatgcatgcccgtcctcccccgccgtcacggcatggccaggccaatccccggtgcccggccacggtgtgattcccctgcgacatgtgactccccgctggggtgcccagcggtgacagccgtgcagcggggtcagtggggcacccaagtccattctggccacagtcccattctggctgctaacccgttggggattccccttgataaatgtctttgtgtcaagatctgtgagtgacactcgcggcccttctgagggtcacttgtggaaactctccttctctctaccaacatttttctaaagggtgttttgttctttggactctctgggggtcaggaggttgtcctgagccatgtgtgtctttgtcgtagtgaggccctgggcctcctgcctttgcagccagccaggtgcaaggcctggccttgcaaatcactgaggaaatcgggacccatggtgctgggggctgcaggtgtaaccagagaactggcagggttgggtagccagaatgaggccacctccagggaaggagtggctatcttaaggggtaattatgatcagacaggacctgcccactgtctttccaggcccccccagttcacagagaggttggcagtacctcatggtgggtagggtgtgaagaggctccaagggagccagcagatcactggaaagcaggggtgactagtcatggacaccctgagaatagggctctgagcttctgggcccctcctggctgggtaaaaaggcaggagcagaggtgtgagcaggctggtagccagatgggctgcccaggtacaggtcagcaccagaaggcagaatgatggcttacactgtggccaaggcctgtaccaagtcctggatatgatggacctccaaagtgatcagtgttagtttagtggctcatgttgtgtgcaatacaggtggcagtgcctgtattgcctcttggctgtcccctcagagaggggactgtcccttctcatccttctggctgcttgcttctcctgttggagctctcgctcaccttggttctcttggtcacggaccagcatccagacatgcaaaaagtcctactgggaggagagggccatcacccacagtccatctagctgggcagccaggccttaccaactcttgggtcttgcaaggcccctgcaggtgaaggtggtgagagaccaggcacttatgtggatcacagccaaacttgcagctgcccagtaaatcaccactatgggggtgagggctgccagtgctggtatcagcacatgccaagctccctggagccagaggttacccacctgcccaagggtgaccccaagccagtgtggctgtgtcatctaggacactgggctgtttcttgttccactccaggatgacagggcctgagagacctgaacatccatccccaagctctctgcccactttgggtctggcacattaccattctgcaagatcctgcagccttttcaggttggcactcccatggcctccagtgataagtgggcccaggcaggtcagagactccagtcattacccaaccaggtccctgccctgtaacttaccaaggcctctctcagagcaggctgttccaaaagtggctgctagatatgagccagcctgggaaggcaggaaggagcccaggcatggggcttggggtgagggatctgaagaggggactgggagagggaaaaacaaggaggttgctgcaaaggggccaccttgaggcattgtgttctggtcagggaagactcagggctgaggcttcaggggagctgggttcctgcatcctcagaagtcagggtacggtccctccagagaggcctgaaggggagagtgggcacgtacagtgtcagggcctaggaacccaggctcctctgggatacaggctgggtagaggccccactccatctgggggagaaggctggcagcagtgggcaccctgtttcctcagggcccaaaccgcctggcggcaggggtgtgggggccgtgcaggtcttctgcccgcattggggctgcattcctccacctcctgcacagcccgcccagtgatgcccataattaaattcggctccagctgctcagggatgcagcgaagctcctgtgggcagcctggccccatggaccctgaactgggaagagaggcacacgccctggtgtgtgtgagggacagggatgtgtgctggggtctcacagggggcagagtgggtgggaggcagttaccaaaaaacatttccatttttcttcagcattctactgatgttaaatgtattaccatgctgggccagttccagaattcaaattaaaaacataaataaagacacattttgtttccatctcgagctctccccgcccgcagggccccagagaggtgaggtcactatagccttgattacgggaaggtccctggggctgggcgaagctcctctttccggggcctgttagccagaggtggggtggggggtgagcaggcctgatgcaagctagggagtcatgacaagctgaggcacggggtacccaggagataaagagtggcgtcgctgcaccccagcctataggtgggccctactgctcagcctcaggaccctcaaccagctctgggcggccaggactcagcctcgaacacacctttcaggcagaagctgtcttcctaggttgaatggggcacaagagagtccctgccagcctcaaactccctgagcctgtgtctcccacccagaaccatatgacagggcttctgagagaaaggtgggaagtagagactgtaggcctgcatgggcagttggggagcacccccatgacaagaggagccctgtaccccaagagccaggatgagttcctgggattctgacccactcactatcctctgctcaccaagggtcactggcacgacagtgggtggggacggtgccatgcctgtgtgcatccctgtgccttgcgtgtggtaacctgccatctagaatgcccttgtcacccatctgcagccaccagatttccattcatctttccaacgtctgctcagtaaaccccccaggacacacttaggctgtacggctgtgtcctcctttggctctcaaagccctcagtaccagttccctaagcctttcgaatggtgccaggagggagaagggcatgtatagccctcttggtctcttcctccccagaacccccaaagccccaggcatggagaagccctaggattgctgctcactcaaccctgcctaagatgaagcaaggactgcagacacattgtgccagtgctgaggcacagggctaggggcctgaggatctgcggctctgaacttgggggctgtgtgcaggtgtggcctgggtgagcttctccaagcaaccctgggaggctgaaatcatttttgtgaaatcctccctcacactgcatccccaactgccaagccagccaggactggcctggaattcacacgtctgccccattggttgcacatggatacctgagatagacggcccaagaggacaggcccataagccctgcagcctatggctctgcccagcccagtcatgtggtttctctgaagggcccctgtctcttctgttttggcatcttagatgggcaagccccagctcgaggttaacagataccgccctcagtcccactctccagagggacactcagggagcacccggcccattgagatgggcatgggggaggaccaggacccccgaggctgggcagagggggtggaaagaaggcagagggaaagctgcagagacccccaccaggtgactgtgagcacctccctggcaagcatgtgcttgcctggcctcttgtgacatgacagcttcgcaaatccttgagcaaaaacagccccgtgtgcgttaattagaatttccatgtcttcaactttctcctggaccctgcagaatctcacgccaagacattcgagttgctcttttccagcaaggccgctgtggcctggctttcatccacatcactactaatgtctcctgaattctgcatttgtcagcaaggacagggccagtctgtgctgtctggaaataagggcaaacgtcacaagggtggccccaaatttggcttcatggaccaaggggctagctcttttgatgggaccagcttggcctgggacattttggagacatccaggtccactgtgacctactcccacagaccccagggtaccaggcactgcagctctgtgagtgtctaagctcctcaccatatttctctccctgtaaactttggtgggaaaggacagaaaggacattctgggaaccagtgtccagaaggatgagtgaggggcttgtcaagaacagatgagaccattttgtctttctagaccagtgtcctgtcttctgcaaagctccagaccacctctgtctgcacgagatgccaaggaagccctctgggggcccgcccgggagggctgtacagggctgcatgagtcataggatccccgtcagagccccacatagccccagccaggctcaaacccgtctctgaaatgcacggggggattaaatgttcttctaattaaattaaaaccgaggcgtaatggctcagtgggaaagagatgggattgggaatcagatgccctcaatctggcttccagcctgccatcagcccagctgtggcggccccccgtggccccctaacctttccaaacttcacttcctccgtctgagcacgtgaggaagaagcggctggcctagggctgctgctatggggagagggccgcactgtctaggtggatggcccagaagaaagcagtgaggcttctcatttcctctgcaagggaaaggccatccaaatcaccctgccccagtgcactctggccaggctcagccctctccacttgtgaactcccagccatgatgctgctcaggtcctcagccaagcagatggtgttggaggatgtgacagagagaacattcacgccacagaggtggctggagggcaaaggacttcacaactgcactgatattgtcatggagacacttctggcagttggggcagggggtcggggcggggttgggcggggggcacatcccatatagatctcttgtgtgctctgctgatacctgaaaggggagattgaactgcagagcctctggaggctgaagcacggaggtgacctagtcaggaagtctggaagccgtgtccccttaagtgagggagtgggatggggctgggcctagcggccctgaaggccagggctatccacctaattaggctcacctgggctaccctggtatagggtggtggtgttaaacttttagttaaagggtaatgtgcatgcacacagattagtacacaggtctcaagtgcgcagcttgaggcatcttcagtccctgggacccatgtgtgcagcacccggaggaagcaacagaacccccagaaagcctctcaggctcccatttcctgtcactgaccttgagattaaccacaggcctaactgctagcagcaaggaccagctttgcccacatttgaactttatgcggtgggaatgatgcaactcatacacctttgtgtccaatgtccctcactcaatttgatgtctggcagcctctctatggggctgaagggagagtgctccctcatgctccttgctgactggtgctccattgtgtgcatggcctacatcattcatccattctaccacctgtggccagcaggcagtttctggtgtaggttgctgtttaagaatattctgtacatgcttttggtgagcatcaggttgcgtttctggggaatatatgcctatgtgtggagctgcagggtcctgggtgggcatatgtttactcttagtgaatactacccagcagtctaccaaaggagtcattccaattttcattcccacaggcagcattctggctgctccacatcctaacacttggcattttccgtcgtttccttttcagccatgatggtgaatgtctagcagcatcaaatggtgattttaatttgcagtaacctgttgactaatgaagttgagtccctttccatgttatcatttagtcagatacatcattctgtataaattgcctacatcttctgcctgttttatgtttatttatggtcctatatatctttagatattctggagtcatttgtcagagagagagatacacacactcacactctctcacagacacacacattgcaaatatcgcctccccctctgcaggctgccttcttcctctcttgatggtgtcttttgatgaacagaaggtcttaattttcatgtggtccagttaatcaaacatttcctctctggatagggctgtttgtgtcctatttaagaaactttgactactccaaggtcataaagatattctggtttattctaaagctttattagctcacctttcccatgtagatctgcactccatctgggattgatttttgtgtccaatgtgaggccgaggtcaaggtccactcttcccctacttggatatccagtctagctcagcacccggcatgggaaggcccgtcctctcccaactaccctgccgtatcagtgtctttacaatcagctcactggctacgtgtggctctgtttctggaccctattgggtgccactggtcagattcaagttgttctttgtggccaggaccttgcttccttctcactgtagtttgctaacaggttttgacagctggtcctgctggctctggctgcttctccttccccatcactggctttgctgtctttgcagggtttctcctcaccatacatatgccagttgccatggaaagcctcctctaggcgcagcagcctctagatgggcatgggagaatgggtatccttatagttttggggctcctgaaacatggcatcatgtgtcccttgtttatttaggttgactttcatatcttttaccttgccctgtagttttcagtgtggtggtcatgaacagcttgtcagattcattccttgtcagctaatggtttgatgtatgttcgctgaatccagggacaaggtctgtcagggagccctggccagcttgggtcatttcatcctgcccacaggacactggggcagtcacctaatctctatcagcctcagtttcctcttgtatacattgggagtatatctcacagtattagtgtaaggccttgaggagatggtgttaggcatccagccacatacctgactcggggaaatgcctgaaaatattagccagcatagaatgtctctttgtgatgggagatcctgtggggacattccttatttggcctgagagcttttgagactgccaggtcatgagttaccatgggatacaaatggggtcacaacatatggctgtcagctgctgtccttaataagatgtgcctagaggcctgagagtcccaagctccaggacagtctggagtcaggtggagggaagggaagtctagaggtccccaagtcacaacctcaaatctcggaatggggttcaggagctgttggggtcccgtggaggtacaggcggaaacctagcactcactattctgctctggggagggggttggaggcagaatcagtggactgtgtctcatggcagtcacaggtgccccagtatgcatctgtcatttgttcttatcactgtcgggcccatctgccaaggcaagcacccacattaaagcagagtgaagagcagggcgagctgtgtagctcacctgcctttgaccctgcacatgacgggcgagggaagaggaccatggtagcttgtctctaggcaacccataggtgcccaatggagagataatctcaaatatggtagcagagttcagactcagtggctttcagatggttagtataggctgaaattccaagagcattaaccagacacctactatgtgtatttcttgtgttggggttaggagatactgctgttggctgagacacacagcccacatccttggtaggtccctcagagagcatctagtgggcctgtcctcccagctcacagaaggggaaattgaagcctcaagaaggatagggacttgccagtatcactgggagataggagcagaagccagggctcattcccagacacacaatctctgggggagcctggatatgcatggcagaggccaggatgaaccctgaagattggtaggaaggcagtgtagcagtaacaagacaaagggattctgtggcccatggagcaggagggaacagtctgcagatattatctgggcactggccagtggctcttgtggctgccctctgcaataagaattcttcaagttcagcctctatgtgcatcataaacctggtgccaccagccaaggaggtcaaaggtcctcactggccagtgggccactgggaagcctcctggattgcctggacaaggctgacctgccctcccaggatgcaaattggcaggcccagcttcatgccttcttatggtgccccagagcccctggctaggcattcatgctttagatatgtgggccctgttagggacaacgtaggtgtcctgggcaggggctgtatctgaggcacacatccttggtagtgactggctagcaggaggaagtctggcagttagtctgagcagttagtctgtcaggcctggttggtcccatgggaggcctgaggtgccatcttagaaatagggccttgttaggagaaaaggaaagaaaaataaaaggtagagagacagaggtagacaggagtccaggtctgacctcaaaatccgatgtccccaccatccccagccccttagcctctgatcttctccataagtaatcttttcccatgtgtggctgcagcctcagaggctccctctgaagatgacactgggaatatcctgaaaaaggtacaggaacacctggcatgcctctcccagggtactctggatgtgcacccagagattctcccactttagcaggcagaagagcaacccagcaggggatatacacaaagatctgagaaagggattatttttagggccaattcaagggatttttcaaaggttaattttgactctgcctgacttatctcctaagtctttggcactgagcatttatacaagatcagactgcactgcaccctaagtataaaccttgccacagcagtgtcctgtggtgccctgctggggaaactgaggcagagagcaggggtgactttgcaaggcaatagagggtacttgggaagtagggtggtaggcaaggcttttcagagaacaaggagctacatacacatacatgcatgcacataatcattctgacccagtcagggttcttcccccaaataaatccctgcaaccccactgtggttataggtctgagccttctgccccagggagccaagccctggagaggaggtgggcagcaccaggcagccagcctgtgggccccgctatgcttcctcaggcagctagtctctgtatctggggtagaaagagtgggctaaaaagtcagctagcacccctgacttcaagtcctcgagtgtatgttgggcttgtctccctaccctggcccggtctgcactcaagcccagtatcctcccctggtccctggtctggactgagcagctgtcttctgcccacaggggacctttcttctcccacctaatcctccctctttgggcctttcaaagttgggcttgtttttcagtgttttctttaggttcatgtcctgatttgttaagttaaattgaattccttccagtccaaaatactcaaatgcttttttctgcttttctttttgaactgccccacgaaccccaccagctgggtgtgtgggctccaggtgggagctcaagggggcctggtgtggtgggtgcagaagcagtgtggtggggcagccttcacaggctgatatgattgagctcaggctggtatgggttaggggatgagagtacagaacagtccaccccaggggctctgaagagcttcaattgagatatccttccctaaggtccccacattccatggcagtgcctaggagctctgtgctcccaggcctctccattaccagcctgtcttccacattggaaggtggccttatcaaaccacatggcctgaattttgattgggaaagcatccctgtaggtgtcaggtgatggaaggactctgggtaaatggaagcactgagaccagatatgataggaccttgcccagtggacacagccagctgatggcagagccaaggccagatgtcaggttccagactccaagttctatgcttttttgctggtccagcatggcctgtctcctccccgcaacagatccaaccagtccccttcagaagggctggaccaagtgaccccaactctgggttctgcctgggcattttcttgagtgtcataccctagccacctgactgtcaggggagcagtatgtggcacttgaggccttgggctggccatgcaggcccaccacaggtggcaaggaatcatgaaccccagctgagtcccctgcaggccttgcctaaaggagaagccagtgaatcaatgtgttacttgaacaaatatagggtctagggctggccaaaagggacagtgaagttggcttctcaggccacagtaggccttcacggtactcagcaggagaccccagcaggcagcatcagggcaggggtgctgaccatccctgacccaagcacgaggatcagaatgggccctggagccaaggccaaaagccgaactgtgactaggcaagctgagtcccctgtagattctggggactgggtgatgcagactgcaaagcctcagccaccttctcccctagaagaaatcttgagagaaacaatcccacaggctaccaggccagcttttggaaacagtctcattagcaaacaaagggaagtgacagagcagagctccccttggcctttgtttagcccaccttctgcctaggcaccaggcctggaggttccaacttggtgttgggcctccttgagccggaacacctgaaaagccatacagactcctgctcatcacaaccacttgttgatgctgacagcctgtagaaagattgctctcagcctatcccctccctggccatgcaggtggaagaccctattacttgggctaaagagaagctaaacgtgaccagcctacccaccttgctactgctgatgaccaccctgactcatgtcccttgtctgcataggtgttttcctataaatgtttaattcctgaggttgctgaatctcagggcttggaaggcccagactggacaggggaaggggtacagtcccttcttgctggtatgttgggaagctctggtgcaaagggcagtgatggcccttcaatcccaggcccacaagcaccacagccaggagagtcaaggttggatatgaagagggacttcctgaaagcaggcacaggaagggatgggagctcagctcaccgggtgctagacaagggagtgtgtctctttccccatgagtgacagcagccacaaggggatgcccagcattgggggtggggtggggggagggccctccgtgctttctggctctttgggcctggggtgcagcccctcatttgtacttgctggctgccccatgggggcttgggctaggtctccctgccggtggggagggaggtgtggaagctggtttgccggggccacccagtgtgggctcaggaagggaaggaatgtgaccaaggctgggtgtggctggggagagcacagccagttgtgggtttttcttggggcccagatagatgtgagcagagctggaggcccctctctcccagcccccggcacacacactaggacctttcttcatcatgcagccgtagagctggaggccaaggacaccctctggaaatctgaattccattcgctcttggcaaagagcagcttcctgcttagggaaggtgcatgcgtgcgtgtgtgtgtgcgcgcccgcgcgcacacgaccacagaggctggggggaggcacgtggggaggagggctgcctgtcgagatgtgtaagatggccccagtgttactaggcactagatggcacttgcaaagcccattcggaggatttagacaaatacctcgagtgagtgaatctgaagcatgctagttgtgttgccttttaaataggctctggcttaaaacagtcacagcgaaacatgcctttgaattggaaagccagaactttttgcaaaataatttgaaaagtttgttgaaccttaaacctttcctgatgactccttccttctgaacttaactcgttaaagttgctccaatcccagcccagtgccagaccagcttcctggaaactctcgccaactgctggcctttggaaaggcttgtcaccctaatagctgttttttaaaaaaaaaaaaaaaaaaaaaaaaaaaagctcactgggcaccttggctgcagggtctgaaaagtcctttgtgttagctccagctgcagagtttttccaggcctcgcttctggggctgactggagctgtttctcttcgtttcctcttacagtggcgggcactcagccggcttcttcccgcctgacttctctgccagagcccaggtgggggacggggatgccaagggcagagcccctggagaggctagtgtgggcatgtcctgagtggacagacctgaaggtgggttcactagcctctttctcccatccttcaccctattagaggtagtgctctagcggggaaagattagggcccctctaggtcaatattgtgtcatttccccagaatagccagggccaaaccagctcccaagcagtactgtttcagaagtgaagataactcacctctcccaaaagcagagttttggcaatataaaacatgaaagtgggatgggatctaagtcatatttttttaatgagtttaaaacacgtgtgtgcattagaaaacatttaaacacagatattgggcaaattaattgaaaaatatattgtcattttgcgttaaaataaaagatgatctgaaaatggaaaaaagttacataaaaacgtaaatatttcatgagacatagcagtcacaacatgccatacacatttcttccagaatcactccactggaaattctgtaataagacatacgtaacagtttcacttcctaggagatcccaattgctcctcagatagggtggagagcaccccttattagagggtggttgggctctctaggagcccgcccagggcctgccctgactctggctctgcctttccctgtcaaaaacctctttgtgctggagcagcccctgctccacagagtgacatgaaccagagactcacagcactgtgtgcggggagctgctgcccgcagggcataccagccacgtgcatgcagggctgcacactgccctaccgtgcatccactgcctggccaacacctgccttctggggagccaatcgtgctttatgtattcaagggttgtgctacaaaaatcatacaacagtctttacacacatggtaaaaccaattcagagtacaaaaggggtgaaaaataacactctccccacccaaccctaattcccaagtttccttccctaaaggttaccactcaacactttcctattgcatctttccagacgtattttatataaacaaatatacgtgtgtctgtgtgtgcatgtacttagtagatacggctcctttttatacaaatggtagcatactgtatgtatttttctacactttgcctttgacttcttccataggtatgccatacttctttttgagctgtacatacaatgctgatttattatggtgcagtacatctgagaagcatttttattgcaaaatgtgtgtttacatgtatacagacacacgtgtgaacaggtgatggctctgaacagtgtagttgaagtgctgttttctcatggttgggcttccagtataattggaaggagcatagtctctgtgttcagctagagatttagcccaatgggctgggcttttcccagataggacatgctcactgttctgctcagattgttagctgtagtctttctggcatcagttccatttctggtgaacacttggacttggcaaaaggcatagaggtagtggtacaggaaaggtctaagaaggctaaggaccatcatactgggtattcaacagccagctctccaaagaggcctctaagaaatgggtagcttcacagattcacagatagatagttcattaaggtcttgagtatttccaagggagcactaactggactacagcctggcaggagataaccaagtcatatgcatagtggctttgggtacgatggtctgctgtatgaagcaaccctaggacatttgaagagaatggagtgatggccagtgtattgtgctgggatctaccacaggggtcatgttgtaatgacacctgtcagctttgactggggagccctttcatttcttagtaagtgttcagccccagtgtgcaccacttaaaaggaagacactggtatgttctggagatggatctgtattaagacatctagcaaatctccttttcattaacagctgcagagtttcattgtgccatgatttatggaacagatcctctgttgatggatatgtagggcagctaaaaaacagcagccattaaccattcaaatatattcactactgaaatgaccacttatgaaattagtttccctgaaacatccctccctattgaacactgttgtttctccctatccatcttatccctacttgtatctctgctgactgacctctttggctgtctcttgtcaaccaaagacaatataaagcacacacaaagtaaagaggaacttataaagaggaactgtaaatcttgtcaaaataggagatttcatcaagttaaagaaaatgatgtcaaatgatttctcaaatagagactgggcagagtagaccagttagttaatcagttgaagaggaaaccaagatcgatgcctagataagcatttcagaggacagcaggggagatgataattgatgcaggtggcctcttggtcaagcagtgaaaccatgccatacttctacaaaaaatgatcctctctgtggaagtgctgccaacatcctctgccaagtataaaagatgccctcagatgttaccatataatgctttacaaaagacaaaccaaaatcccctctggatttgtttttttctaaaacgtgtacataattgtaactctaacaactgttattgcatatgagataaaataatattttaactactgttatttttcaaattaacttcccaatcaaatatctctattgtaaaattttggtctccgttttcagtggatttactttaagagatcctccctttccccccatttccagcaggattaaaatgttcatttatgttgtgatagatactgccaaataagggctgtaccatttacatcactttgactgcacaaatgcactttcttcccccacccttaccaagtgtatactcaggtttttatcttcattcatttcatagatgagaaatggtacactggagctttaatttacatttcttttgttggaaatgaggtttttatctttccaaatgcttaaaatcatttgtttttctttcttgtgaactatttcttcataccctttggactttgtaaaataccttgtcttactgatttgtagaaacttgctttgtcatattcattgaaaatattttatcctcattttccttaggtgttttggctttttctataatatttttctggtggcagaatttttttaatttcacatagtcagctgtgtcagtcttttatggtttgaggtccttatcttaaattctgaaataacctctcatcctgaaattgttttaataaattcttccatgttttcttctatcattttttatttcattttttacatttaaatccttgctttatcgggattttgacagagtaattaaatccaatttggtttcccatatatttgtccagttgtccaacactatttatttgagtacatcatcatctctctactaatttcaactgctacctttatcatatttcaaactctcatttaatttgtgtccatttctagactctattctggactgctgatgggcctgttgataggccagagctcagttattttaattatgtaactttatgatgcacttatctgtgtagcaggactccccctcatctccattacttaagagccaataatgggaagctcattttcacaaatgcagtcaaccaggggaattcatggcatggcctaagatctaaacactcttaagatttaaacacaggattagctcttgagttagacaggaagctggggtgtttgggactgaggcttcatcgtggcagctaataatgtcagggagcatgagcacttgtttcttccaaggctcacttcaaggaaggcagaatccaggtcgggggtgcacaggagttgccagctggacccaaggaccatttcgtatacatgtatgatcatactttcagggcatcttggaaaaactgaatttgctaactcaatagagaacaaaagagcaaataggcctaattcaagaatttttaaaaacccgcaataagaaacataatctaaaacttgtagcccagcccctcctccataccaaccaccaaaaaaacccactaacaccataaagtgtcatagctagagctagagtgctgttataagctgtgcaggccaaaatggtttcatggcatgagttgggcagcagcgactcagtttccatgtctgagttaggccacctgtaacaatgcagccccatccatgtgaagctggtccagaggactacagctgcctgtcccacccttggctgtgctctcctttactaatccatagccaaagacaggggctaataacagggtctggagtctgaactcatatcctaattccactactttctacctgctacaccttgagtgagtcacttagtctcagtttctttatttgtaaaatgggaatcataagagtaccttcctcagagggttgttaggaggattacacaaattaataatataaagtatgcagaaaagtgcctgtcctatagtagtgacacagtgttacttaaatgtattgctatacctcatgatggccattccatccattgtaatcatgtgtaccatgcaattcacagtgcctgacaaagctgatggggaggcgagttggaatgaatagtatcagcatcagaaaaaatacaagtgcatcctcataagattatttaggatgcataggatcccagattagattttttttaaatcagccgttctctgtattcttgtccagatgctgtggacagtgatgatgggaaaatagtccctgctgcacactagggcctgttaggccagttgagggctagaggagcacaaggggccagactgctgctacttctgaattttataggacatgcatttttttcatataaacttagaactagcacgcctaattttttttttatttttattttttttgaggcagagtctcactttgtcacctaggcgggaatgcagtggcacagtctcggcttactgcaacctctacctcctgggttcaagcaattctcctgccttagcctccctagtagctgggactacagacatctgccaccatgactggctaatttttttttttattagagacagggtttcaccatgttggccaggctggtctcaaactcctgacctcaagtgatctgcccgcctcagcctcctaaagtgctgggattacgggcgtgagccaatgcacctggcctcagcttgcctaattaaaaaaaaaaaaaaaaaaaaagttgtctatctgtgtgtatattcatatcccattggcatttgttattgaaacttcattcaatttagattaactgatgaagaattgccttccccacctcaaaaaaaaagtctttccagccacaaatagaagcagtttacccacatgttcaaatccattgcaacatccttccatatttttttagatctttgtatggattttggacattctaaaattcatttctgggtatttttaggaggactactgatttttttttaatttgggcattttttaaaataaatttttattttgagataattgtacatttctcatgcagttctaagaaacaacacagagaaatcttacatactcctttacctagtctcccccgatagtaacatcttgcaaaactgtagtacaatattctgaccaggatattgcattgatagtctcactacaggacatttctaactcttcaagaatccctcatgtcccccttttatagctacccccaattccctcccaccctaccctgtccttagcccctgacaactactaacctattcttcatttctttatcattccaagaaaattatataaatggaaccacatagcaaatcacctttttgggatcggctcttttcactcagcacaattccctgaagattcacccaggttattgtgtgtatccttgcattttggtatgacccaatttgggtttgtatttttaaagctgatggacactatttactagtgttttcaagattgcactgaccatcataggtgaaataggtatgtgttcttttattatgaaagcctcctcagatgtggacattagtgaaatgtgggctccaaaaagagactttggaagatttcactaatgatgtggttattttttaaatagatgccccccaaaaaagcacctatgaaaaaattcttacatagcaattctacttctgaatgctaagagggtttggaaaaagtcatttttgcagtgtttgtgttctatgaagagtgggtagaaggaagcaggagagtattcctgcctccccaggagagagcttcactttctccctataccttcctgtcctaccagcccacctggttctctgtctctctccaactgtgaccgtcttttccttgtagctccctgctcactccatgtggaggatggctcttggggctggggtgactaaaggcaaagaatggggatccctgtgacagctctaggggattttgggaccagataaccttaatggcctcaggctccctagatgagaaatgggacttagtaaagtcaaactggtccaggttaagccagcccatgatgcctggaaggaacttacccttttctagagtaacttcccttttcaggaagtttctagcttgcttgctcactcgctctccccacccccacccaacctcccccaacctatctctccctctctcaggagaaggtgctccctcacccttaaagaccaggctgccgttgcttcccatgtgtctgttcctctattcagtattgtgggcactgatcacacaccagggcactgtgggggccctgggacctgggaggaccagaatgggtacagtccctgccttctcaggttatggtcatatcatccatgctccccaaacatcaaggtactccaaaggaggcccagcactaccatctaggtggggagaaaacacaccggccataatgaacacacgtttaggctgaagaataatcttcaaatgatactactacttacacttcctgtttgccaggcaaatatagacatcatttcactaatcctcacagcagcttttaacacaagaatattatcactcctgttttatagataatctcctaagggttgagggattgagtctagggcccagggtcacaaagctagggagccgtggatctgcaggagatgtcccagctcatcaaatattctttcagtattaaacatatcaagctctctcctgaccttctctccccttccccaggccaggactgtcttatcctgtggttcttagctgaaatgtcccttcctcagaggagccaatttctaaagcttaagactgggctgtaaaaaatcacatacctcccctcccattcttaatgtgtaactgtgtgtttatttgtggtaaagggtttactggctggctccttctatcacattcaaggagcatgagggtataggctggctgtttctattcagtgttttatcttcagtgcttaatccatatggagcctgtcacggaccctcagtgaatgtttgacgagtgagtgagtgagtgagtgagtgagtgagtacttgtgcccaggtcaaaccaggtgctaggaccctggcaggggttccataaggctatgctggggttcaggcaacccaaggctggtctggagagtgtaaggcttgagagctcttcttcaggctcagtcatccctgcttccccagggctcatgtccacatgctattgtccatagaagctggggtccaaagttgaccagaatatctctagtcataaagaatctcttccccttgagcccactcatctctgttgacattctagaaatgcagggaaatctgggcaccatgaaatgcagtgacttgcagtgatcctcctggggccttgtatagaagagaccatctcagttttgtagaccaggaaactgaggcttggggatagcagatgttcccagacagaaaatggtggcacctggagaggtgctcaggtctgtgtggaagaaaggacaggagtccttctgccacccagactgtgcattcagacatctcccttgtgctgtgcagccttagttctgcctcctgagagaggtgaccttctcccacttcttacaggcaaggctcttgctagcctgaggaccaggagccttcagattttcttgttcccaggatatatcgcaccaactcaggagggtgtggggatgggctagcattaggaatgggtattagcatctgcattaaaaggctcccactgacagctcatgcattgtgatggaactagaggtgagatacagagcaggagtccatggcacctccagaacctgtcagcctgagtatgggcaatggcgttttagtttgcaaaaccagacacatagaggccaggtttcccccgctcaacactaggccactgtgcctgccactgctgtctgcaaatgcaggttcctggggctctgggtggtttgtccaatggctaagctttccccaggaatgggtaactggaaaaatgtaggaattacatatgattccatcaatgacagttttcctattaaaacataacttgttaaagcatagagcttagttcagagtaaacatttctaaaaaagaggtagaagcccctacctactgactggcatcacaaacactgccctgaaatgccaactcatttcaaatactgctctagacaactgggccctgcatctgctgcaaggaacatcccttactttcccatctcaatacaactgtgaaaagcctagcctgggactcaggcctttccttactccctctggttacctagctttagctctgaggcagcccagatgacatgggcctctaaggctggctgctcttactctataccccaaaatcccagccactagcttgcagaatggctttgttggattcccctccctggccccacactcactgctacatctctcttccaaatcataaatgcaaaagatggccaaaggtgcatgctctgtgacacgtttcatagtcagacaaaaccagctgactgcttttacttttttttttttttcatttagaagaatttccttggcaactccgtctctccttagtcaacatcagctaacttcatcctccccctttatcaagacattgtttagagtaaataattcattaactggtacagcaatttcagaaccctttcacatagattcttaaggggaccgtttcccttgaagaatggggtacaccagaggacttaggaagagaagcgcccactggggcttggtcagactctgccaggagacaggcagctgtctgttaactgaccctacccagtaccttctgggattggattaacaaaaggggagttggttaggctggagcattgcaactcatttcttccctgcagtctctctcctgaggtggcccaggtatgtgtttgaggcctgggacttgctgccagcatgagacaagctccagtggggtccatccccctgattcctcagtgccccagcaccacctctttcatttgaaaacgtgttcttttggcaaaaagactatgctccagaactttctggctgagttctccttctattcctcctattccactgttaggtgttggaaaagcaatatatttgatgctttctccatgtcccataaatgactttctggcagaggagagtgactgtcctttgtctgtggccctggatttgaggctaagccttccttgaagaaggaacaggaaagaaaggcttgttggatgtgcagggagctagtggccaactgagcacttgctcaggcggaggggcctggagagaacccagggtaggtctgcctgggagaaaaggggtaagggaggactgcctcccagccttccctccccactggtctgggcacattccaaggcttgaggtctcctagtcaaggcctcctgttattggcttcctccagggagtctgctgagacaaaagttttagattctttcactacatcataaggtaggtaagtttgtgtccctgatccatgcagcatgttatctttgtacctggtaaggagtgaaatggcttccaattttacggactggttgcttttcattcatatcttcttgccatccctgtctcatgggtgagcacatttcctggatttaaaatgtatgggacagcctgtgagaattacagattccagggaaggggcccttttggcacggggggtctgatggtcagagctaatcaggtgtggaagaagctgcctggagaggatccccatctgcatggaatgcccccttcgtggggatggctggcacagctcacacacggaggcactacttcagtcctcccattaccaaactccagggcacacgtgccactgtgtcttgcccacaaacatgcacacagagtatcgatctgtctgatgtttcagggacccagccatgtcatggagggtacatgggcaggtaccatctctgcctggtacatgggcaggggatagatgtgtttccatgggtctccttcacatagaattgtcacctgaacgagaagcccttatccagaagcccagtgcaactcccatctcacaggccaccagcaagttgctcacatccagacaggagacgctagtcctacaggtgcagtgggaggatctgcagatgactacagctcttggcccttccatacagcacatgacaggaagctaggagggttgcagctggctgttgccattccactcagggttgaggggacaagcccacacaggtaccagaagttcaggggtcccatgtggacttcaggccttcggtctgggaccccagggagggtgctctgacagtccgccgaaatggccagcaggcaggcatcctcccaggtggcagtgagaaagggccctgcacagtcagcgttcctgagaatgcgattcctactagaacgaggctgtttcccaggctgcctcctgcttcacccaggactcagaccacaactagactagggaagaacttgttctccacggatgagcctgaccaagttctgggcccactctcccatcctcctgctgggtcacacggatgaggcctgtacactctgggcctcagactccacaccaagaagagtcaggggggctcactctaagccccgccagctcgcaccatctgatggggcaggggcaggggaaggacagggccagcattgagtaggcctgagttgatggcaaagtgtaggcctttgccctgtctcgcccccttgcttctggggtttgcttcgcctttctgagagcacagcaatgcctactcatcctgcccaaaaccctgctccaacctagctgtgtgacctttaggccttgggatagcacacagcaaatgtctgccaccccagtactgccactggcttgggaggccagaccacagaccacactagtgtcacctggcccgtcccacctgttccaagctgggggaggagtatgctcacttgggcttatcagcagagccagggtaccccaacccctgactaggatattgtggatacctatgcccagagcccctccactgccaagtttccacaattgttttgaaataattcccaacagatacccccaccctcacccagtgttgagtctcactcccgtcacggaaatgacagctcccagccctgggcaatgtgctcctgcaaggacagctgtggtgactagaatggcagcttggctactagcacttttcacatgagcgtggctgccctcaggcccaggctgcacagagcatggccgctggatcaagtgtgggtcccagttggatgacaaacccatgttcaaggctgggaagtcctactcggccccacttctacccaggaccagtagctttcaattgtaaatgtgcatcccctgtgatacactatgatgcacaagcagcccctgctcacccctaaagagcagcacaagtaactcagagccactgtcccctctggccagaggccctggtttgtgtctgcccagtgaccagcctgaagatagaggcaacccaatccaggtccatgcaggtctccgtgatgcggagcatgcccagcttaccatcctgatgcagaggcaaggacaacactgggccctgacttgctaagatgggagcaagagcttagggctaaaactcagcagtcccagctctgggggacaaggacccacaaagtgatgcaagatatcctgagttgggtgtgacaagtacaccttgacacacaaactgcacagggaggggaggaatctgagccagcttcctccacaaagcacagaagtctgccaaaagcccaggctggatagggagcatcacactgttgggaaatgtgcaattttcactcagccagcatcactaccagctccgggcttctctcctctggcctcccaccttgcagctttgagatcccaggcctctcagggctctggctgagggctgtgagccagaggctgaggtagccaggtctgccttgggctgtcactcagggctgagctctgctgaaggatctgggaggtcagtaggcacctgtgtccacccagctgtccatacagatccctgcctgcacaagagctgctgcagcatttcaatagggccatcccaggcaccctaggacttgagaccagcctcctctgtatggtcccttccctggtgcacctaccacagcccactctgatgaccccctgtcaaggaggtgtgactgagaaaggaaggggcagagatcccttctccattcctctcaggcccctgtaaaaattgggacctgtccttgccagccaggtctcagggagctcagggttcagtgttggaatgggtctgggcccagatttcaagccagtaaccagcaaatcatggggagactgagaagaggagccccttagcaggcctaaccacacccctaagccacccagcctggcccccctcctctgccccaactggctccaggccaaactctggttcctgaggagcctcaaaggctggacttggggtgtcccgcggaaatcctggtgggatggaaaatccccagcagttgtgaggctgcacttctcccacccgctgtgggtcagccaggccgctgcttcctgcttccctttgatgtctcctcgtgcgagggaggggtcagcacccctctaggcttgggcaggcacacactccactcagctgcagccatggagttggtgcttctagggcctgggtatgctggagtcaggcaggggacctggtgggggtggggatacaggctgaggtggagagaccccacgcagctccctaggcctctgcagacagctcccaagcaagggggcaggaggggctgcactgagcccaccaaaggttgtagccactcatacagggctgtttgatctgagagggaggcgccatgacctctgtttagacaaggaaaatgaagactctggaaaatctaagcacgtcacacacacagcttccatgggggtcttcctctcgtgtctggggaacttccccgtagaggtttcaataactgccatcctttgctgatcctctgtgtaggcactgggccccagcccctgcctgtgccatcactatttcacaggagaacaccacactgaggctctgcctctggttgccctgctctgggtgatgaggtagaggtcacacagccaggccagtggccctagtgtcaaggttccacaccacagcctcatagcagccagtgctcgctcactgaggccaggcactcatcttgtgctgtgcctgggtgagctctggacctgcctcctaaacatagggctgcctgcttcgttcatttccacacaccacgtgcctaggcccagctggggctggcatacaaattgggtggcccggctctgagctgctgctggttactgtggcagtttccacctataccacacctatatacttgccctcccccacacacagcccacctggcccatcccacaaagagagatggcactccaggtggagagggctgggccagaggtcatgcagcaaggtcaggttggaagctgaggtggggctagggccaccccacacaggcctgtctcacaggctgtcacccactgggcctagggctctgagagtaggggtctgatctggagagcaggggagcctgcaggtccctgggttggaatcctggagccctgggctgcagggttttgaggggcagttacctcctcctccccggtggcacatccggcctggaagttgggtagtctggcccaaggcctgccctggtgtgaaagcctgagaccctaaggagagctacaggtggctcaagggcctgctcctcctccttttctgtgcaaacagctcagcttgctgactttgatgcagtggtttaggccaagctttgaagtcagcccttggaggacgttcctatcagcctttgcacagatatctcccactccaaccctaagactcaatgccacctcaggactgcccctatccgcagagcttgaggcctttaggtcagccttgggaagaggtgcttgagtggggtggaagaagcccactcttgggaaatggggagcataggggaggaggaagacactgccttggaatgacactcccagagacctctgctctgcctacctgcattctgctgaaggttttgggtcaccttgttttatggtccctgtcccagcatgaagcttgcacaggaagaacagaatgaatgatgtggaaatctgttagcagtggtgtcttctagattctcaaggatccgggtattttaggaacaaaacaagccagcaggtgcagaggtcacaagcctcctgagagggccagggcagagtgagtagctgcaggggcagctgtcctttgcacctgggcctagagtgccagagacttagtctcatttgtttacaggagactgatgggttcctgagcagcctaggaggggaggggaagcactgcgttctcagtgtggtgcttggccctcccaggtgcctggttgtggcctgccacttagcacccacccctgcctatccagccccatccctggggaaggttcccacctgctccaacttctggtactcccaggctgcctcacccaacgatgacagtgactagcctcagagcctggctgcttggaagacctttgcccaagcagagaactgttgaggaaggtgagccttccgagggccagccctgcctctcctcccctctcctagcctgcttctgtctgggctgaaggcacagcagggacaatcgctcttccggggttagaactgggggagcagggacaaaaagcgggcagccctccccagcatgacaggatgtggaaggctggtctctccagagactgggctaaactctgctgtgtcaagtgcctggtgacctcaagcaagtcattccatgtggctgagctgctccttgctgcatctgcacatatgtgtagtgtcttcctccctgtaggattgtcacaaggattaaatgatgtcaagtctgaggctgccctgcagctgctgtttccactacttggcatggaacatgtgccagaccaaaagagctatctctctccctgcgaaaggctggggtcctgggagctagagctgggttaagataagagcagagactgggtcctgggaacagccactgggcccagtcgggggggtctcagcacctatcacaaagaaagtgccactgggcctagggaaggacaagaagtaacatgtcaaagatgggacagaacccacctcctggcagggagtggggcacacatatgtgcatgttcatatatgtgtcagaatgcgtatttgtcagtgtatgtgtgtcagtgcacataggtataggggctgtctctcagaattcctgagggctttccatttgatcccagtggttgaagatggagtatgatcccaaatcccttaggtggatgtggcctggcagggggtcagcaggagggaggtccctgtctccttggcttccagcttccaggctctggcactcccactgttaggaacaggtacctttagggacacaggagtgtaagccactgtttccgtctgggttttgtcatgtgtaggtcccagcggctttaagccaacctgaaaggttcatttgggagtcacgggtatgtgtcaacaaaagcccaccagaccatcaatgaagtgggcaaaagctctgggtgaactcttggctcaggtatcaggatatgctgggtgagggaaataatggaggcacctttgttctagatgcctgcagattcctgacaacagtaggggtggaggctgtgcagacctggtgcagagtctgtgctggcctctggcctctcacagccttgggaggggtgctcagagctcagctgtgtttaaaaattagcaagtggaggagttagaggatctgcagttaaccccttgagtctcggaaggctgtttgagccactaatcaggaaggagagctgacaagaaaaaggcgatgtctcacccctgagctacaatccactgcacttacagtgaccacccatcctgacatcttgggctcaggcctctgggtctgggcatagaagcccaggaactgctgtctgtggggagtccactgaagctccctgcccccactgagtctctgatgttgacagcctctttgttttttcatctcagcctattcaaggccatttttcagcttgcttggctttgcattaaagttggggggatttctctatcctgaggttatgaaatacctcagcaaggacgaggcctccctgagggagtcaacctagcttgttccctgcacgtactgtggggaggtcctctttaccgccacagttccaagggtgaaacagagaaccaggtggggaaggggtctctccccatctgtccaggggagaggcagcccacagggagccacacaggcaggggacattccactagggccatttgcaggccagtggccatccactgccagcaatcagagaatcacaagcactggatccaatgtgacctctgccaggaccatgacccctaggtcctcttttccatccctccagttctcctggctttcttgccatctttctggctctatcctcagtctccttggcaggttttcccttctggcatggccactaaatgccagtgcctttctctatgcaaaccatttccctaagctgttccctcagcaccaagggcttccagaccacctgtgaggccctgaccccccaaatgtctctccaacccagccagacccacattccagtcacctgcccccacctcctctccacagcctccatcattttatagcccactctactgaaggcccctgtcctttcagtgtcacccatcctttcagtggcacaagtcagaagttctggggtcatttccgatacacccgcttcctcaccacctgcccatcacctcaagcccatcaccaagccaggcttacttcacccatccatagttctagaggttccctgcttccctccatccctattgccactgtcctgataggccaccatttctctgtactgcaggcatctcctaactggcattctcacatcccctgccccattccaatcaattatctactcagtggacagacatcctttcaaagtttagagacctgtgggtcttgcttaatcctgcagctgcctttctggtagttcagatgcttggcttctttccatcccaggtgctcacaggctccctaccaccagagggcccttggcctgcccctgccactttccccaagggagtttttcagaccccaggctagttccagtgggttcctgctatacacctgctgtgctcccaggcctcagcactcccctcagggtgcaaacggtccttcaacattagttagtctttctcccctttgtccactaaccctgggagggtaggcaggtccctgctcctatcaaatccctccctctgggccagggtctagtacctgctgagtgtttgacaaatatttcttgaatgactgcatccctaacatgaggcaatgatcattcccctgcctgttagacataattcactgcctgggaaggcactgtgctgtgtagatgcagcaagctggctaaaatcaactgtagcatggcctatgtcccaagcaggttgtcctgcccatacgctcaataatgaggcccactgaactctcctggtttccagaagcctcataagcaagcacgctcagtgaaggaacaggaagtcctttctggagcagggggagagaaaggcatccagttagccatagaggggaatggctccttactctttaagagtcatttgccccaagactactttctgtcaatcaccagatagccctcagtctacactctgtgatccactcatgaatatctggtctggctctgcgttccagtcagacccttttctgagaggaccacaagtcatagcccagggctacctgtacagctaccaggcttaacaactcagatgcacaccctccacaactgctcttagcacccacaggcctgggccctctctccctgccctgaagccaaccagaccctgggtgggggccgagtctggccaagcagcagtgtgtggagctgggcctgggcctaagctgggaataagcttgttttgccaggcgctggccccccatcgagtccccattctctaatgctaattgctacaattagcaggagaaaggccttttagatccatttcttctcctggctgaggcccgggctgctagggaggttgagcccaaggcttttcggaggagcagggattcttccataaatgaggccacatttaaattgcaaacaagagcttcgcccagccgtaggaaaggctctgggagaaaggcttttagttccgcagacagagcagccagagactgggtgcgctccagcctcatgggccttcctggctggtgtgactggaaccctgggttatacaggctcctgccagtaacctggacatgctggggccggccagttcagaggagcatggcacaggctgataaaggcaccggaaggaaaggcagtattagaggccaccccttgccctcccatccaggcctgctctgagggaaaccctactcgtcctcctcctggagtgtactgcaaacctggatccggtatccgctgagaaccactcattcatcagtctgcactaactggagaaggtgagcaggcccagcccggcctctctaggccacctccaacttggtcaagccacaggtgcccatgccatagatggctgagggacggcagctgacacgtagttccaactaaacctctgggtggcagcccataggttgtgggactggaagtgcttgccaaacaaattatactgctgaccagggaagagggtactctgattggccaggcctgggccagggtctttctcaccgaggtggtgaggctataggtgttagatgtggcaggatgcaagccagggcctgctgcctttaaagagccacagcagagacaccatcccagtcccaagagctgttctaaggaagtggttgtcatctgcggtgccccccaggggacatatggcaatgtctggagatatttttggctatcatgactatgggagaattactaatatcaactaggtagagaccaggcagggtgctaaacatcttacaatataaatgacagcccctcacaacaaagatacatcctgtcccaagcattaccagtgtggctggctaagaaaccctggttgcaaggggtcagattttgacatgctatttgctttctcactgagttgtgaaaatggaggcacactttcctggcctggcctcttccttcgttcaataaatgaatgaaaccattcaacagaaatctgtgacacacccaccatgtgcggaccctatacggaagacagatatgctctcttggggcctctcttccggtggaagagataggcagccaacaaataagtagatgtctaaggaactagaaaagcgtagcctgtgctttgcagagactcgaaaggtagtcgtcagctagtgagtgactgaaggggatgacagatatggcaggtcagagcaaaatttcctgtgagatttaaataagaagaaggaattgtcaagggaagatcaccagaaaagacaagccaggcagaggtggtgaaggccttggggcaggagggatacttggcagatttaacaaagaagaagaaggctggcagagccaaagctcagtgagggaggacagtggtcagagaggtaagcagggcagatcttgtaaaaacctgatggaatttgaattttatttcctagaaatagaagccactagagggtatctggcaggagagtcatggaggcacattcattcgttggttcttggcttttgggactctgcacagagttgatcacagccctcagcctatgaaacactgtcaccctgtaagggtctgcataaagtcaccgctctcttcctctccatgcttttccacttcatctctagcctctatccttgctctcctccctacacaaacagcttctccagggtaatttatttatatcattgtgtgtgtgtgtgtgcactcacgagcactccctagtactgcgtgtctgggtggtgtgtaattttaatttaaatacacagtcatgtactgaggccctctttctgtttggcatttgtgtcactcagcactgtgtttccacgcgtctctatcttgtgaagtgtacatctagtcccctgctcctaaccacagtgaccagctccaactgcccacccctatgggccatgctgccctgagcatgcacacacacagcctctcgttgttctgggtgagaactgctccagcatgtttacttaggagggaaactgctgggccacaggtataaaatattttatttgaggaagaagtgttggccagctcttcagaacgtctgtgcctgtctccgtccccacctgcagcacacagggaggcttgttccttgccttctgccaacacttggccttatcctactttctaatgcttctcctatgaagaatagctgttgctttcatttacatttctctgataactgattagcttgggcaaattttcatctgtttgttaaccctcctgcaaactggcaatcttcctacctttttcttaatgatttgtggtgctttctggtatattttagctgttgttccctcctcagctttaattgtttcaaatatcttgtaatgagtcatggcaaagttacattcatgagtgtaaaagtgaaaaacgcaaattgtttccttagtattattatgaaaacagtcttgacccttgccatgatggatttatttaacagaaatccttaatccataatcattaatgcattcaagttcatacattttagtcttgaggtttgtgctttctggatcctgtttaagaaccccacggccaccctggccctggagattattcattttttctcctattaaacaaatggcaactaccttttgctttcaaatatttagtccatttggagtctacttttcctaggggctcagttaggaatccatattcctattcctccattttagggctggctttccaacatcatcttctgaacagtccccactgatatgtggtgccacctttatcacatgtccccttcctctagacttggagttacctctgagctctcttctgggcctctgtcaccacaccgctctgattgctgaagttggcgtgtgccctggtatctgccagcagaagtcctctgctctccttttcaaaagttcagttggcatttacaaatatttttcttccacatacattttagaatatgtttgttaaattactcaagccctccaactggaagtttgagtggagtcctgttgaacttaacagatttggaaaatcctgacgtcattctaatgccaagttgccctgttcaagaaaataaaatgtctctgcatatggaaagatctccctctatatcctccaatagagttttaaaattttttccataaaagtcgtcgtctttgttaattcctagactggtataaattttgctgctattctgattgctgtcctaatctctattatgcttttttttagtcagttgctattggcataaagaaatgtggtttgtttttgttttttgttttgagtacactgatcttatatccaaaacctctctgaaatctgaaatctctctttagttgttaagttccttaattttttttttccatgtagcccagtaattttcaaagtgtagtctggggattccagagagccccccagaccctttcaggaaaggtcaaaaacattttcataataatactcgacattatttgccttttctttcattctcacaaagataaagagttttccagaggcagcacaccatgaccccagtggaatatgtgcttgtatagttctgctttaaacatttcttagttttaacttctaagatggtaactatcaacagatagaatctctatcaagaaaagccctttgggggtttcaataacttttaagaatacaacaagtcgtaacaccaaaatgtttgagaatctttatggagaccatcaaccctatgagctacactaagttttatcacttcctacctgatcctcacatccccatttctttttcttgtattagggtatggccaggatgacatccttggcctactccttatcttaaagagaatgatacacttttaatttctctatcaagtttactgaaaagttaagttttggtttataacttgtatcaagttgaagaagttcctctctagtcctggcttgctaagtggtgtactccactaccccaaaatcacacataggcgttaaactttatcacatcatttttttctgcctctattgagggaaccatatggtttttctcctgtagcctcttaatgtgaattacatggataaagtttctgatattggatcatctttgcattcctaagagcaatcccacttgtttaagaattgttgtttaatacatattattggattcagttagctagcattgtacaaggaacttctgcatctacattcataagggaaattctttatagttttcttgtgctttctatctgaatttggacatgctctgattcgcaattttaaaaaatccctctagctggagcataaatcctgaaacagacccacttttctcctcagcatgttaggaaacacattaaaatacacccataatcaagcaactcaatccttaaatttttctcctactgagtatctggaaaacaggtgcagaaatggatcatttgagacaccatagaaatctggttaatcctgcctgcctgctttccttcaagtactgactgagtaaggctgtgtatcaggctcttggctgggtacagagcaggcagcagaaaacaaaacagagttcctcgttgggagcttttggtctagcaaaaggggcaccacagtaaagaaagaactggtaaatgcacatcaaatgtggatattatcaggaaagtttttatactttgtgataatctaagacagaactattctacctggatgaattattctctttcataaccagaacagtgctgtgggaaggcactcttactctcaattttatataaaaggctatttgacctgctcagggaccacagtggggtactgggatctgaacatagtggtggcccttcaagcctactacccagactgagacctgcatctgatcaactctcatctccaatatgaccaagagacttctaccactacctctcacctggcaggtgatcaccacccccaactcagactgcaacctttacttcgccccctaattcctgactcagaatccccacctagaggcagaacttcgacttcaattcctgactcccataccccactgagacctctaaccccaatcccaatctcttaactcagagccccccattcagaacctctacccaaagacagactccagaccctgactccagtcgccaactcggacctcccttggatctcaactcagagccatgatgcagactccagaccgggattcaggtccccaactcagactcccgatcctctgtccctaatgaggccctacctaaaaccaccatgcggactccagacccggactgactgggaccccaactactcagatcccaactcaggcaaactcccagccaggatgtggaccctagacccgaattctgatcccaactaggatacctaactcagaaccacaacggggattcccacctccgatcctaattcgggccctgactcagaaccactaagtggatttccgactccggtcccaattcgggctttgactcaaaaccacaacatggattcccaacttccatcccaatagcgcggactcagaaccacgatgcggattccagactccaatcccaattcagcccactctgaaccaccatgagaactatagacccggaatccgatccttgggacgcggccaggaactcggacctcgaccctggccacgctgtccataaggtgcagatgggagcgcactgcccaggccaggctgcactgctgacgcctgtgatctgggacggccgcggggcacacagctcacctcagcaacgccagtgatcacccgtcccgcgccgtccgcccaggtccgtgctgaccgtgttcaaaccctcccagagagatggggagggccgcgctgaggagagtctgggagaaccgcactgaggagccgccgggagagtgccgcgctgaggagcccccggggagagtgccgcgctgaggagcccccaggagagtgccgcgctgaggaggcccagggaggaccgcgcggaggagaaccatgctgaggagcccccggggagaacagaaccgcggcgagaggcccccggagagaaccgcgccgaagaacccccggggacaaccgcgccgaagaacccccggggagaaccgcgccgaaaagccccgggtgccccgaggagaacggcgccgaggagtccccggggagaactgcgccgaggagcccccagaagagcgccgcgctgaggagccccgaggagaaccgcgccgaggggcgcgccggggagaaccacgatgactgacgcaccgaggaggaccgcgctgaggggcgcaccgggagaatcgtgctgaggagccccggggaggaccacgctgagaggcaccccggcagaatcgcgctgaggggcgccctggcaggatcttgctgaggagctccctggaggtccgtgctgaggcgacgcggcgaccgttctgcctggagactgcggcagcgctccgactgcccccgccgctgccgacgtggcgaccgccccccacctgctgattgggcggcagcaggggaaggcttgcggcgggctgctgcacggattggctgggtgcggaaagtgatgtgccgtgtcctgtcattggccgaaagagtctcgttttgatgccacccgggctcagattggcccagcgggtccagcgccgcatgaggcactggctgggtgtgaggtggcgcgagccgccgccctccctgcccccacccgtcgtccctgagcaccaccgggggccggggccagcgccagcctcagcgttggcatcgccggggtgagctggagacacgggccagttctctgcgtgatgtgttcaccaccccggggtgaccgcgtgaggacagcggccgcaccccgacactgctgtgggccctcggtgtggaggcctgtgggcgtccaggccacgcccgagaccagcccctccgccggcgccgctgcagcgaccctcgaacccgggcaaggtctccaccgccgtggcaccgggtgcgggaggcgttttcccccctcccagcgggtccatgcaggggatcgggatgttctgaagcccccactgctgtgcctggaacacccgtgtctgccgctcacccctgaggacttgggacctcagggggtgagtggcaggggtggccgggacatgccaggccacccacctggcaaagggcagcgccgagggcgccccgcgcctgccagcgcccggccgggcccgccctgcccacctcccatcccccatccgggcgtgacacttgaccgcgtctgccggcccctccccttgtccgtcccctccgcgccgctggcgcgcgccttctgaatgccaagcattgccataaactccggggacaaaagcctgggtcacaaaagccccctctagaagttcacaccctgaggcttccctggcaaggctgggggccgtttggcccttccatgtggactgcaaaaacagtgttggaatgcaggactctgggtatgttctcgaaagttgttacaaccccaacccagggttgacctcaaacacaggaggaagggggaggctggagccagccaagcgagccagccgtccccccaccaaggcacgcaaggaggccattcatcttcactgcctctgccgaaaatatacgtctacgggagagccaggaatctctctccaagggtgaccgggttgggggttttgttgttcttcagcccagaagagaaagagaaaatggtgtcattttttcaggcagcaagtgattcctttcaggccttcagcaacgacgcccagatgagtccactccctgcctcctgctcagcccacaggcaatctgggcacaagtgacacatcccctgggcgcctgtcccttcgcactggcccagggagttcatgtgtctgatcagagggcgcagtccaccctcactatctagctgggaagtttttgtcatctgcctgtccgagaggcagctgtgcaaccagtgccatcactcagagccagtgctcaggtgcaccccagactcagggtttcacgctataatgtcactgtcttgaaattcttgatagttactatctttgaacttgtgttttagaagtgaagtctgaggggaaaatggagcttggaacttcagctcccaagtggctttcccaccttcctgcctcctcaggacagattatcagctgcctgtctgcctgcttcctctgtgcccagcctctctcttgacatccaaaggatcacaactcccactcagtgaccactattattctctgcccctgaccaaaaagagcagggcagggctggagtcctgaccctggcctggactctgcaatgcagagatacctgcaagtctcatttccccgcctgtaggatggaggtgatgctgacagcctcttggagccattgagataggaaacgagagagattatgtgagaagacagggtcaggaatgttgagttgagggtggcctcaggcccctgtcctgctcctttttgctgcttggggtgcagctcaattccagcctcactgtggcccccaggcctcctctggccttcctcagccttcctcaggaggccagaatcctcccctgatcaccctccctgcatgtccatttctacctccccaggaggtcaggggagcaggatcccaggtcttcagagtcatttcacagatttcaccagaataaaagtcccactcatgtggggtttacattctggtgggaaagacagattttcgaaacgtggccatttttctttgggcctttgttagctgcatcagatggaggaggtagcctggtggactccttcagtcctcgctcttggacacagagctgtctcccagcctttgttgttgtgttctccaaggatgtcgaacacaggctgaaaagctccctaaatcaatttcacttaaaatggtgtccaccctcctactaaagagtgacaaagggtgttggttaggatttttatcttgaaaactgatttgtaaagtcatgaaaattgagcttatttggtcttacacttaacaaaactgtgggttctaattgtgggcctggatggggacatatcttacaagtagttgattcatttatatagattttcatgttctgggcttgcctccaccctctacctaaccctggaacctcagaccccaagctcctgggcacttggatttttccctgacaaattccccgcctgtgatattccatgggcacctcaccttgtgtgcttgtgtgaggtctccttgagtactcttagcagtggggttgccaggccaaggagcctgtcactattgtttgtgaccagctcaccagacgtggtcaggaaggacagttctgtgtcctatgtcctctgctcctcaccccctcgccacacacggggtgccgtcaatcagccagcgccgcctgccagcccagcgcacctgttgtgtgcccccactcccgcctcctctagtcctttgggggaagagtggagaggaaaacaggccgagactgagaggggtttgttgtctcgtcgggcgacaagagacacgtgggaattggctagagaagcatgtgaggctgggcggactccaggccagccccagaggcagatgggggctgccaggcaggctgggaggtgagcccagggctggccttgggcaccatggcagaattctgggagggggctgcagtcacggccagctccctttctgaattgttctgtgggttgtggaaggctttgaaatttggcgcctgcaccttgtcaccttcttgggactcaaggctgcaggggtgggtgtgagacagagagcctgggcacctggtggccactccctgagctccccacgtgacagagggcaggtcccattctccttttgtgtctggtttgcctcatctgtacatggtaggggctgagctagcgttccttgcactccctccagctttactctttggggttcaaaaggttcccttgcaagcctgtgcacccgagagcacgcacgcacacacgcactcacagctgaagagaattaggctcaaaacgtccactcggcttttctcttgattccaaggtatttagagtgggggtgggggattaggggaggaagttgctgagctaattcttttgcatttgccagcacagaagtgcagatggggcccagagccccggcggtgtcccaggggaaacaccagtcctcttctgcagtgcaaggcaggagaaagaactgctgtgggagcccctcacccaagcagcaggatgtgtggcaggccctggccaaggagttctgtgggcctcaattctctccctaccctgcccccaccctcggagtctaagggtggaaccatcttcagacccagccaggttcccaagttgctgcttccctcggaagctgagaggcccagggccacgtggcagcctccgcagtccatctgaagaaaggccccaccccacgctgctctcaggagtggacaggaacgtgggggagtgggggtggttaggacctcagggttatccctgagtggctgatgcattgccaggaagcctgctcttaaggtcagcccttgcagttggcagtctgtggcccctcctcggtccccttcagtgaggctttttgcatgcattggtccacacacccaccactgcagctgtcctgggtaagggctctgtgatcctgcaacgcccaccttcttccttcactggtcataggtttctgctgaccctgcagcccatgtccttgttccagaatcttccgcctcctgtggcctgtgtgtcgcctgcacctgcattccactggggcttcccttccaacttgatggtttcaggtacatgggcctgttgtcaactctgttcccactgagcccatgagacggctattcctttgagacatgtttacttgacttcctgccccaggtctctgctgtacccacaggtggcatggactcatgtccccacccaaatcacatccccaccaggatgggcaggctctgggtccttttgggccttgtaggctgtcgtcagaggggaggcacagtggggagtctctaggaggttttgggcaaggcagtgccaaggatcagatctcccttctagaaaggtcactctggctgctgaacagagagagaactgaagagaggcagcagggtgagggggaagactacgggggacttgccgtcacccagtgagagagatgggagggttggagaaagcgagcatctgtggaggtgtgagaagtgccaggctgggctccctcaggcggcaactttgtctagacttctggctgaggacagggaggagcttaaggtagccctcagcatccaacaggggtagcagcctagtgcatgtatgaccacgagcgagcccaagggaaggacgggtttggagggtttctgaagatctggcttggatatagtggggtcagaccctatccctccacccagctgcagtgacaactctgtggctctggggcactgtcaccctgtggcatggcctgtttgtggtgtccattgccgtcttagctacccaaggcccagggagaggcacacggctcaggctgacagagtgtgacagatgcaggtcctgctccctcagggaatcccccattccaggacagtctcagcccccatgcaagagcagcctcagcatgggctgctcggggaatgccctcagacaacagtgctgtgttagggtcactcccagcctgtcctcacaggcagatttgcgttcctgcatttggggtcagtgataacgtgaggccagacgggtggggggtctggagttcaggcggtctccatgagtggcagcacggggtgtgggccagttcccattgggagggcagctgtgctgtgtgtgtatatgtttgggcattgctcagccaagccttgattagccgaacccaactctcccagagcccccacttcgacgcgggttaactcagcagctgtctcctgagcacctgcttggggcctggttgggtgccaggcacgggggggtgggaaaatgaagtgaactgggcctgccagacccattgcctgcagggccttttctaccaccaccttccagaggcagcttcctcccacaaagcatcccaagctcggggtgtgtgccccccttcctgtgcaggcctgccacttccacagctgccccccagccaagaacaatcccctcagcctgccagggaaaagtgggcccaggcctttgaggacattgccacagccagggccaacctgggaagttgtttctgattatctcttgagtcctgggagaggtgttaacaaaaagccccatccctgtcgctctggtggttatagtttgttttacgcattaaaaggccctggatcggtatttgtagtgagaacagatatttgcagagagcctactccattcccagctctgtacttgtagagggtgaggctgctgaaatgaaacccaccaggcctctggtgagcagtgggtgcagagtcattggcagtaaaggtccttagagaacctgaagagaatattctaatcaagctaggcaggctcagaagatggatgtaatttggaggaaaaagacaagaatgggaaagaaagggaaacctacctggggtaccgtgtggctgtggtggttttagtatgtgtctacaaggcctttgacaatccgttcttccggaagtggcacttaattcccctctaattaagttttggctggactgtgatttgcttctttcaaataaaatatggaagaagtgacagagcatgacttccaagactaggccttgcagcctccctgccctctcactgggatcactgattttgggggaagccagccaccatggtgtgaggacactagcagccctctggagaggtcctgtggtgaggaactgaggcctcctataaatggcctcctgtatgagcttgggagtggatcctccagccccagtcaaacctctgatgagacagcagccctggtctacaccttgactgcagcctcacaggagatcagaaccacccagccaagccacccccagatccctcgcccacagaaaccatgtgggatgataaatgtgggctgctttaggaatgaagctgtagggtgacttgtcacacagcaaaggccagctgacagagccacccactctcaccaggcttagtctgacccttgtcaggggcagcaaagtgggctcagcctacctgttggcttttactgatggttggtggctcccaggagaaagagtactgtgcccaggtagcatgcccaccccaggcatacatagcatgtctttgctcttgcagagtttgaactctgcccaccagaccagtggctcttaacctaggctcctcgtgagaaccactccccggtgcaggtcccactcccagaaaggagagcggttttgactcctgcagtctctaaggcagcagagagctgtggcattttgggtggagtgggtggagagggtgcgtgatgggtgggagaaactgacagttggaatgtgatttaggaaatgtaacgggtgaccttttctccccaagagaacaccaaatccatttccttgggacatggataaggctaagggcagcacccacaaggaccaggagcggggttctcaacagccacttctgtcccaaatttgttttctatgcccaggaatgtcaaagggccctcttggggtcagccacagagaagggggagcaggtgtgatggggtggtgatgggatgctgtaggtggatgagaagtagcaccaaagctcactactgtttttctcttatccctgggtcttggggacaggcctgtgccagaagcagggattgcttctgctgtaacgtccactggaataaaaagcagacattgcagtgttgagaaattcctttagccctcaggaggcaagttacagaacaggacagaactgccctagtcaggccctgcctgggcacagagctgccaccactcttccaagagccctcccttttggggactgtgcccccaccccacccccaggcagcccctgcctccaaccttactcctagctggtgttctgggccgtcagttcataggtccagctctgagacctgccaggctctcagagcagcctggacccaggagagcgataaatggatgtgcactggcacactccaagcagggaggctttgtttatctcccaattagtcctgtagcacttagtatgtcaggcatggttctgagggcttcatccacactaccacccactgtagagatgggaaaactgaggcatagcaaggtcaagggattgggcaggccttaggatgtagaagctactagagctgggctgcacctgggtatcctggagccagggtctatccctccccctctgccacacggccttggtgtgagggacacagcccctgtttgcagaggcagctcctttcatggagcatgggggacagggcaggtgtgccttggcccacatttggcttcttgagcgccgaacctgcatgtgccaccccccagagttcctgtgtgtggccgggtgaatgtgcacaggtcgaggaggtggtgtgggcagccaacctcccaaagcaccaggcccctcagggctgttcccctgtttcccaagatttcccaaacagatggccaagatcgggggcacccaggagaccacgctcatgaattgttccacttgaacacaacattgttttttatggaactgggctggggagtcctctgtgactctttcctcagtagggagagagctcctgaacccaccgtgcacacttcttcagcagccgctttggagacttgactttgacactcttctcaacaggatccctttcctcactggtgtctgcggcccgggccgctggcatggctgagcggaacttggcaaagcagtgaattgggagctcacttaggcacgtggtcctgaggctccttgctggcgtttctgttttgctccctgctcctttcttttctttgtaacttctcttcagggcacccacagcccccgaggagggtggggctgaggaggctggaggtggagcccaggcttatccccctggtgggccaggcaggcagcaaagggaccaaccccaagagggtcggtgcggagacccctggggtgcacagggtgggcagtgaccagaagactcaccccagggcctctaattttgacccttgatctgggtctaagcacctctgagcaagaggtgagggtttcaggcagcctcagctcttaggaggcagaagatacagtttatacgcgggttgcggggggcggtccatttccatctccctgttctctccccaggccaatggccagggctaaagccctccttgggacatgtcaatagcagcaaacattttaaagatgtgacatgttcgaagcctggcaacaggggcagctccagctgtgcgagaacatggctggatttacgtctgcggcaaagcacccggtcacctttctctgcttggagtgcaatctttttttggaagccctgctggaaaatctgaatcttgtgagccatcagctgtttataatcagagaagcatatgtttaaaagagctgaggggccttataaactccgtgtgcaaattacctttggggctgcctgctccaccgcccctccctgaggctgccatcactggcgagcggctgagtgtgctgcacagaattcgctgtaaccctgttgtggcacggggtctgtttagctttagtcacgtcagcttggccctggagcgtgggagcctccatctctcctgcacggcttccaggccccccccacccccaccccccagccccagctgcagaggacttctggctccctgttcctgggctttcagcatgagaaatatcaaacctgggaaccgtgcagcaagaagcgggcagaggctcagacgccaggacctgcgggggcttcctggaattgggagccactctcggtgtctgctctggtgctacggtcctgcagggctgttttttttttattttgtattttttggtgttcatttttgtttttgtaacagctttattaagataaaattcacataccatacaattcacccatttaaagtgtacgattcaacggtttttagtacgttcagagttgcgcaaccatcacactatctagttccagaacattttcagtgcccctaaaagcaaccctgcattctttagccgtcactccccacttcccttctctcattccccagccccagtcagccacggctctgctttctatctccacgggtttgcctgttctgaacatttcacatagctggaatcacacactaagcagacttttgtggctgacttctttcacttagcctaaggttttcgaggttcattcatgctgtagcatgtatcagtgtttcattcctttttagggccaaataatatgccattttatggatattatcacattttatttatccattcattcattgaacacttgggccatttttactttttagctattagtgaataatactgccaggaacatttgggtacgagtttttattgtggacatagattttcatttttcttgagtattcacagaggagtagaaacgctgggtcatatggtgactccatatttaaccttttgaggatctgccagactgttttccaatgtggcagcaccattttgcattcccaccagtagtgtatgtgagttcctatctctccacattctcaccaacacttgttactgtctgccgttttcattttagccatcttagtgggtgtgaagtgatatctcctagtggttttgatttgcatttccccgatgactaatgatgttgagcatcttattagccatttgtatctcttctttgaagaagtatgtattcaaattctttgcccaaattttaattgggttgtgtttttattatttagtagagttctttatagtctagatataagttttttatattctagattcaagttccttatcagatatattttcttcctttttgtgggttgtcttttcactttcttgatcatgtcctttgactcacaaaggtttttaattttgatgaagttcaatttatctgtttctttctttggatgcttatgtttttggtgtcataactaaataacaacatgtaatctgaggtcaaaaagatttacccctatattttcttccaagaattttatagttttggctcttacacttaggtctttcatccgctttcagttagtttaacatatggtgtgaggtaggggtctaactttattctttgtcatgtggatagacagttatcccaacaccatttgttgaaaagactcttctttcctcagtgaaggatgttgatacccttgtcaaaaatcagttgacagtaaatatgaaggtttatttctggattctcaattttattctattgatttgtttgtctatccttatgccagtactatatcgtcttgattgttatagctttgtagtgagttttaaaattggaaagtgggttttccaactttgtttttctttttcaagattattttggctattctgggtcccttgaatttccatatgaattttacaatcagcttgtcaatttctgcaaagaaaccatctgggataccaatagggattgcattgaatctgtaggtcaacttggggagtattgccatcttaacaatgtgttaagtcttccaatccaagagcatgtatttcattgtatttggatttttaaaaatttggttcaagaatatctcatagttttcagtatagtttttgcactactttgtaaatcctacagggttttgtgtgacagtgactggcagccatacttcctccccatgtactgggttctgcccatcctccagcccatctcccttggagtctctccccgactccagggctcatggcccctttcaggcccttggcttctggtaatgcttctttgtggtctcctgtcttgcgcactaattgttgcccaagtctttgcacatcctgcatcctgcctggagtgttctctctcctcccttttctgtgagccgtcatgaaacacctcctgtgggcttactgagccaccatcttatccaagtgctctgtggcagcttgtggaatcttctcaaccttgggtgtcgcctgcccagaacggggctctcggaggccagggtgactccactatcccaccaacctctgtaccccacggccatgcacaaggcacagggtcccacagagggtctgtgggtacaatggagctatttcccagtcagacctcacaatcggtaaactgtgcttaaactaagtgaggtatcttaaggctttaccaccagggaaatagaactttggcagcttacaaaggagttttatttttcaaatttcctttcaactcgagggtctcaaatccactcagcagacttaggagggagggtcctggcactgcttctgaggagggtgcctttgaggggaggcagagttggctcacgggaaaggctggccctgaggcatggcaggtggcaggtggctggggctgctcacctgctcacctgtgtccatccccttgggcagcacacagccaagtccttttggaccaaattggatcactgccaaatggtatgcccagccttgctgaatctctacccatctgtaaaaaggagaaatcgtttctgtgctccctgcctcccagagagccagggagaggccaggatccaaggaggtaacggctttctagccctttggaaacctgagtggggttttgtgcttgcatctcatttaagccatgaacacttgccggctctctattcatccacaccccctgcatttattgagtgccttctgggtgcccggccctctactagatgtgggagttaccgtgtgggatggactgacactggtgacccctgcctgggggaagcagactctagctgggcagcctggcctcaggagatcatcacaaccctcgctggggctggggtgcaaatggggcaggaacaggagtccggcctgggggatgttagactcaccagccatcccctggaaagctgtggggagactcagagcagagcccccagtaatcatagtgaggtatttagggatagagtggagatctcgcccacatattcccgaagccaccaggccagacaccgccccagctgaatgcatgctggcggcccaaatgttagacactcttctctcttaggtggtttgaggagacttaggggcttccatattccccttggaacatgaagaaggggctggctaaggcccccatccctgctcaggcctacaggagagccctgtggacactccagcctcagccttccttgccatccgcaaccacaccagtggctggaaagccagagtcccctggctcctgcactttttctgcacgggactccctcacagcctctgggttgggagcacacatggcatctcctagagagtttgggggctggacacagggaggaggcagcatgggaaatggaaggactgcagcccccgcctccctccaaggcagttgtcagagcaagatcagctccctggaagacacccgggttgtaaacagggtggggcaggggtcctggtaagtatgaggaaccagagacctggtaagtatgaggaaccaccccttggcatggggcacccagaaggcagcaggctaacgactccccatgaaattaacaactttgtgaagcatttggtatttgggggattttacattagggttaatgagcctctgaaatgagatcccggagaggggccaggaccatgcctgggatgtggcttccgtggactgagcagcctggagcccctacttgcttggtgtcccgagccagccggacctgcatcccgctcctcctccgctccctggaaacgttccctgaatcacattgttcactgcgcttctcaggccttctgggctcttcctctgctgctcgccataaaaactctccagtcatcttttccgctgtggtttttattgttttattttattattccagctatattacgttgggaagagctacagaaatggtttcttctcccccagattccagaacaagtcacagccattgtagattttgattaatcgccatccccattatttcttcactttctccagctgaatttttcccactgtgggaagggggtctggaggacaggcacccttgttggccgtggataggtttctgttctccctcgacccacccagcaagagaaaaaagtgagctgacattatgggtcggcccctgttctggaggccacagccacaggctctgcgggcctctggccgagctgggttgcaggagaagccaagtgccgggtgaaggcctggggaggaatctgggttctcttggctgctggtaagattatccattaaatccatattcctcactgtagagttcatggattcagaggatataccgtattctggccgtcttacattactgcaatattgcttccagatgggcaaacgcgcgctcggagcctggccctgcagacacgatggcccagcacgccgctcactgccgcgcctttgttctctgcttcctgctcggttcctgctaactcagggagctccaggtggctgccactcaggggtgtgtggggggcgccttggggcacccaggcctgcagccctcccccacacaggcagtctccacagagatagagcgccaaggatgcgggccaggactctttccgagcctctcctgttgctggggcctgctccctgaagggcacagtcctgggcaggcgcagtgcccaggctggagaggtcctgcgtctccatctcatccacaggataagtcaaatgggagcattccagcattccgcatctcatgggggggttgggcctcacctccctggcagcccactcacctcacatggcctgagccgcaaggtcagccccctcccaggcccgtgagaggcagcaggcactatgggcgagctgcctgctgggccacaggctctggtactctcctgggttggggctcccggggtagggctaagtgtggtggcagtggagtcagggcagctggacagcccctctgccatcagtgagaactgtcttctctctgcttcccctgtgcacttctgaatccccagggctgggcacagggctgtgacgccataggtgctctagatagatggaggagctcacagctgcagggagtgttgggtggacatatggggtgtggggggcgaggccaggcttcacagaggtggaatctcaaaggaggaagcggcatgccaggtggcggacatagcacctgcaaacgcctgggaggtgaaggcaccagctgtagccagcatcccagaaagggacacgaagcccttggggccggggtggtaggggtaggagagcatcttgagggtggctgcagcatcgtcgtcatctttccaatggtggcatcccttccccaagcaagggaatgatgcagacagaggtgcctttcagaaagaatggaggtcctggggacctgacttctgggtccctcaggacacatgctctccagctcgtcagtgttacctggatactctaatgggggcacaaagccaggggggagcctgcaggaggggcctagccagggccaggtgtcacacaagcagagctccagggtgcagctgggcagattgccggtggttggtgctggtgaggagtagcagggtggggtccggcggtaatgccactgatgatacttggcgaggatgaccgcaagtgtcttgacccaaacatgagatgcccctcacccatcctcccatgaacctcagcatgggcaccccatgccacccgctccatttacagccaaggagcctcagtagagacacagctagaaagtggccagctggggtttggtgctgagcctctgtctgactctctgctctctggagagctcaagggaacctgtaaagacctgcgggctgtgtcatggagggcccttaccccggaggagccaggaaggtggacagagcaggcaggagtggggcaggagggggctttgcagattacccagaccctttgttggccagtgtgggaatggggggaggccagggaggaccccctgcagcctggctcaggcaggggcatgtgtgaaggcccagggggaagagagcagccaggtagacttcgtttccagccggagtgtacctggggatgcctgtgcccaagccttcctcttccaccacccctgctggggtcccctgggacccatccttccaagcccctgccagccttggaacctgtgactccccaggtggtcaaacacagaaggacctcttgggggaaggggaaccagcaaagggggtatggggagccctctggggcaccctcatatcacaccctgtccctctggccacattccagctggccctgcctgtgagggttgaccagctggagcagccccgcatcccacatccccgcagccttgcgctggtctaaatgcctcccagcctcctgaggttgagggtggccacaccagccagagcttgggtgattgagtgggtagagggggtggccagagtgggaaccatggtgatgcaaaccataaacctgtcccccacgtcacctccaaaccctttgggctggcctcttggtgaggaatggccctgggagaggctgccctgcctttgacctctcatgcactgagagtaatgggcaagcgctgtctgcagagcactgaccccaccgccggggtcggagcccctattcctagcctcccttgagcgttttggttgccggatcctcattaatggctgtttgtatcacttaacaatttttcacttttggaggggtcgtgaataaccccaaagcaacatgtaccctctccgggccaggctcaagcggtcctctcactagggaaagaagtcagaaaaaagctccaagctgaagcgcccacacctaccctctgcatcagatgtgctgcggctctcaaggaaccctctagggcacagctttggggagtggagctgcgtggtcagctggccaagccacagtgggaaaaggtggcccattggccagaacacagtccccaagcctcctcagctaggctctcgaggaatggctgggtgtcctttctcagcagaaaagccttgtccccagcctccagggccaggctccagcttcccaggcgtgtgcttcccacccaggctcttgtgggttggcttgccaagcggtgttaggacacgcagcttcagttctgcagggcctggtggaattccattccctgcctcccagaaatcttatcttgagggccgctcagctacagtaggccccaagccccagagactccagattccccactacggaaggcagccgtgaaaggcacgggcagcgcggtgcttctccttcaggaggtggaactgggtggcccgcattgaacaggccaggagcactggtgttctggatccaaagcaaccatctcttcccacatttggagggagccgagggcaggcaggagccaggacccagtgcatcctgaatactgggtgactggcagacatcactctggcccaaggccaggcctgcagtaggagctctgtgcatatcccctatgtgagtacaggaacctcagtggtgcctgtggagctgttcagtgggccctgtattcgccagcacagccatggtcctgctgagtgacaaacagccccccagatgtcctgccctctggtgctgcttgtccaccatgaagtggccggggctctgctcagggacccaggtgctcttgcagacaacccaagtcttccttcctactcctggcagggcaggcaattccactgatggctgcagtgcgacacagactgggcctggcatggtgtccctcagaccccacggcttggtcgggtcacctgggccatttcaaaggctgttggggagcaggaatcacaagctggatgtcagcttgagggttaccccagagtgagagcctcgacagccaggccctcccaggcttctgtgatcgcagcccacacctctgcgcacagtatgccaatgttccccaaaatctacatactgagaaggtagacagcaaagccacagggagacttctgggtagcccaggtggaattcttcccttcctgtttcccagttttccacccttttccctggctttcttccagaaccttttaatgaaagtgcctctgccccaccagggcctggcttaggatgggtgagggagaggagctccgggaggtcacggccccacccaggaacgttcctgtcccaatcctcccatccccatattcaggaaagttccccaggcccgtatgaactggcttcttaattttgttttaaacacaagctttcagaagagcagaaacggaaagacagatggcaggaggtgccgcagggcagcactggggagcctgagatagagagcgggtagacaggaaagcagctcacagcggctggagagcagggagcacacgcctgtccaagaccttgggccagaggaaccccctctcccccgatggcccactcgccccagggcctccaggtttgagccccccggggtattagcccagcattttaggggctgccgtggtcatggagtaaagaccacacctggcatggcttccttggtttctgaaggctgcgaaagctgcgtctgtcgcagaagtgaaccttgttttgttttgttgatgggtgtagtctcagggcatgttcaatgtctgtggagctgcctcttctggaagagccgggttgacacccgcgtgccccgtcctggcttaaacactttgaggccctccctgccctcgggggagctgagagccccactgcagcccagaggccctcccctgacagctgccttcctctgctccgtccttccccacatccccctcacacaccttgtgcttgctctgggcttcaggggcctgagccccaggtagacccccacacttagggtgcctcaccacactccatccctagccccagactggcttccctgcatctggctgaccccctcctcacctgcctgtttccacctcagggcccctcctgaagccggaacttgatccccgcagcaccagcccctccccgtagcctcatggggcacagctctgaggatgtggatgagcagaggggaggacagggatgatgaaccccaggaattggcttccagtggatgcaaggctgactcgtacatgtcatggaggatagttcgggcatctgagctagctgaggctccttggagcacatgcatggcctggactgtccagaagtcgtctacgtgctttgtgtagacgcatgactccccagctggctccgtactagatgacctgggctagggccacttatatctgtcaggggaagggcagttgcagttaggaccacactaaaaggttaatgtccacgctggtgttgaccaagccctggaccctgctgtgccaggcactcccatcagcatccaggtgcccattttactacagggatctgagagctggctaggcaggcatcccgggtcattactgggcctgtaagggccttcatgtctgcaccctccctgccatgcaccttaaggtcaggaagtccattcaaatgcagattcctgggctattccaagagttactgaatccccaccctggggtgaaggcttggcgtctgccagggaccatagaccacagatactcatctacgcttgtgacccccctcccgcccctgagtgtgtgctggggcaggaggccctgtggcaagtggagccccaaccgcagagcaccatctccagccgtgtgctctcgggtgcagagctgacctcccaagtctcaggcttcttgtctctcattgggggtaacaatggctatgtacataagattaggagaacacacagaaggtggtgctggctaaagccattatcacaggctggtgcctatagtcccagcactttgggaggccaggcgttagagaccagcctgggcagtataacgagactctgtctctaccaaaaaaaaaaaaaaaagagccatacaaggtggtgcgtgcctgtggtcccagctgtttgggggctgagatgggaggatcgcctgagcctgggaggtcaagagtgcagtgagccatgatgactgtgattgacgtgttgaccaggcactcaaaaacaaacaaacaaacaaacaaaaaaaaaaaccattatcaccccctgcacacaaatcccagagttcagagaacacagatcaaaataagaagtcagagaatcctctccagctgaaaaccctcatttgttatcacccaaatgctgcctgctggctggcgagccttgctggtggtggaaggcccagcagtagcaaaggaaaccagggcaggacagtgtaggaagtcctgccctcggatcatttggggaaattggcacctgtgtttctcaccacacagtgttgggttggagaatgggcctgggtgcagagcttcggagccaaacaccgtgctggtttcagagaaacaaacagccctgatgtagctgtggcccttggaggtgtccgaatagtccatcattttcagtgacagaaagacggaaatggacacagatcaaacctgcatcacagatgtatagctaggtcagcgaaccactcaaaagaccccagggtctgaccccttgcacgcctgggcggaggtggagccgcttcaccatacatgcaaatgtagcaaactgcaaaatgtcccaaaacaagtcccttactgtccgtgtccctccatgccagctcactggaggggctcctgctgaaagaggtggggttcagttcccaaacccactggagggttgcaaggagacgcttctagtatgttagacagcacagtcttccaaatggactgtgggcatgatggatgtgtaaagaatcgagaagccaagtgcccttgccatttgttatctttaaaaagtatcggtgggctcatgggggcttgagtgtcctggcagctctcctcatccatcctatgtgtacactcaggcacgtactccctggctcagccgccttccggggcccggctacagtcaggcctccttcgtgctgagcatgtgctggccctgcctggggacagctgaaggccaggaggaagctgctggcctcaagaaggcctctcgaagcagaggcagccccctcgaagctcacctggcctctctctgtaaggggagagggacccagggctgaccagagcaagcagtgtgccattaacccctacctgtccagaactctgagctcctgtgggtccttctctgagtgtcctatgttgggggtgtcagcctgggtgtcaaggctgaagaggggagcctccttggccactgaaacggaaacagcattagccaccaccagccccttcccccttttgcagggcggctcccagaacctaggagtccatgctacctgtggggttcatagtgtgtccctctcagccaatgggaagtcgtgcccttggatcatttggggcaaatggtcctcgttttcttcattatatggtgttgagttggggaacggccttgctgggagttggggcctggcctggacctcgaggccactggggacttggctacctgagggagatgaggttgttcccagggtttcctcatcccaggggctctcagatttccagggactcgggcaggcacagctttccaggccagagccatggacggtccctggacacctgcagcagccaggccccagatgcaagaaagggtatttgtttcttaaagcttgtaaagagtttctaaaaggtggggaggggattggtgggggcctgtctcatgttttccattctggacgccggggggacatgttgctggggccagaccaactccagggagacaactcgacaagttacgaaacatccagcagcatccacgactaatttcttccccctgtttgtcctaccgtggaggtcgagttaaaaggcagcacttcgggggttgaaaagctacccgcaggggtctgctcgtgagggacccccgggcctctgcagcctttgttcagaggcagctaataagccgactcccgctgggcgctttgtagcgaggccgctgttcccagtcctagctcagcctccctgcctcagagggctggcagatcagcaaattgctgtctccagctcgcaagaggggcaggtccagggatgtgtttcacccccaaggtgtgagtggaatcagcaaattgtatcaagaaatatttctagggatttacattccggcggtcagcagcctttgggaggctttactccgcctgcaggggtgggaggcctcgcgtagagttggtgggggcagcagagcctgggtgtttcaggaggacccactcactctgggccacttctgatgctgcagatcacgccaggcaggcctccggccgtttgtctcttccgacagcagcggtggtgatggtcccctcggcctgcctggcctgcagcagccctggctggaggctgaccgagcctccgaggaggttcacctggagctgtctgtccatccatccatctgtcccttggcccctttaagaggccttgtcccctttgccagtgcagggagaccccaccgtggacttctcattgggacttccagtgagacccaactccactgcctggggataccctcaccccaagcccaaggagcctgtccctacgcacaccccctgcccctgggaggcacatgccgagctttcctgtcctccatttggtggccgcctcacctccatggggtcgcagggcccacacagacagcctactatggtcctggcaggcacagggtatgggaagccctgtgcccctgggatcaagcttggatcctgaggtcctgagcttggtgagtcagggctggggagccacaaagccagcatgctcctgccttttgggggtcccaggtgatgtgtcatcttaccaggtgttgacaggtggagagaggtaggctgggtgaagataggaaaggactatgggaggccagggcgggcctcgggtgcatgcctctctgtggcagtgacatttgtacagaacgaggcaaggccagcccatcctgggagctgagtgctggaccatgggggctgcagcctggaactgagcccagagactgcagcattcagaggtcagggatcaaggaggacctcacaaaggagatcgggaaggtggaggcttggtcacccccaggaggagctttttctaaggaaggagaggccagcatgtcagccacggctggtgggtcccactgaagctgagaatagaactggcagtggggtttggccacatggaggtcctaggggagctgatgagagcgatgccgtagccagggtcggcagtggcggaccgagagtgcttcccttctcacgtggttgggagtcatgacctgtttagtaaataggctatggcagcctcttggaacttagtgaggtggctaagctgcccctagatagctgtgccctgtgaccaagacccttcctccctccttccctctaccccaccaggctcagccaactgacaccagggccctgtgaggcagtatctgagccacccttctgagtgggagctatggcaagtgctgccttagcggagtgggggtgggggcatgtgtcactcccaggaccaactggcagatgaaggtctttgggcactgcagctgccacctggggtgcctcggggcaggctcacctcacacccttgtgggccagctgcggcccaaaagcctcctggcctccattcccgtgccagggtggtctgagcggagaggacaggggggatcccagacggatcctgaaaacaggctccgccttcctctgtggctctgccttcctcttggctccgccttcctccgtggtggcctgagaggggtgtggtgctgcttgtccgtggtgctccacacacctgccacagctgcttaccccactccctgccgccctggacaaggtgcccacggccctgtcccatttaccgttggggcaagtgagggacgaggaggctccgcagcctcccccgggacactgcaaccctcaagactcctagcaagcccctccgtctcagagccttggtgtccccatctgtaaagtgggatgtgacaatacccttcttgctgaatgggcagggagagaggagctgttaggtgagaccaggtggtacttggcagctgtggcacgtggaagccctacacaggcagccccacacctggtccgctgttctgtccttactgtagcagtgggcctggaggcagtggcatttagagaggaccctgaagtccaaagaggggatgccagcctcaaactcagcagctcgaagtagcaacagcctcgaatccctcacacctagcggttggctgggcaggtggactggtccgagctgagtggtctaggatggccttgctcccggagaagacccttggcagacagcctctcctctactagctagtggggcctcactaaccgctggtggccgcagggttcccagccactcggtgcacatgtactccagcctctctgtgtcccatttgctcatgacatggtggtcaaagcaagtcacggattccagggggacctcgggacgaggaagtcacacgttgggggatgtgccgcagggatggggcatctcagcctttgtatctgccgtgggcgtggaggcatttactcttttcaccgggggagcagaaatcagaacatggctctctgtgtctgacacagagccctgtactccatctatgcagcccccaccacctctgcacacagcccctccggtggtgcctgggggcccaggcttttgatagagaatcacatctggaccaggacgttctggtaagatcgccagggggccgcgacaaggagaccaggaaggaaagacagaaagaaaaacacgcacagatccaggctcagatgatatacagtcctcctcccggctcaggacccctttgcggtgtcacctttcggcatgtaaccacttattctgtcagggaggagagccctcccgctccaccaggtgacggccctaaatcctcaggagtgacagcgtcctcccgcccggattgggtttctgcacagtggaatggagctggcagccagggtccctgtcccgccagccctaggcctcgaaccctccctggcaagctaacactgcccttggaggaaggagggtgggagggcaaagagagagaagtggtgggtggcagcgagcaggctgtcctgcaaggccgtggctgcactgagggcagaaggggccttgtcacctaggaaggaccccactaggaaccccttcccgcggaaacacagcttctccccttgggtgccattgcagctgcacccaagccttgcccttccctctcacttcgctccccaggaggcgacactgtgattgtcctgggctcacagaggaggacgtggggacctgcccaaggagacacaggcaacagaaccagggctcagagttgggggaaggggccagttcacccacagagggtggagtcactgggctgaagcttctggccatcgtatggagctggaacaaggcactggaaggtaccaggcctcagcgttctcaactgtgaaatgggaacacggtggtctctgtcacagggtagagatgactgatccagtaacctggacagggtgccgagggcagggtctggtgtggctatcaggagccactggattggaacttggtgtgccaccagggtccctgtccgtttaagaaaagcctgtgggcccaatagagaagcacagggtctgagaagcatcagacaatgactcctaaacaagctcacgtcttgaagcagtgctggacccgtttcagctccaggggagagccagggcagggtggggcaggcacggattcctgacgtggagacaggaggaagccgacggccatctgtgctcagacccagtggtgagcctaagacaagttcccagaatccatccgggacagacggctggacttgtgaaacactccagggtcgggggctcagccacgggaccagcgcttgccagaaatgttcccagcttttttgagttcgtgagtggctggtggatacttagtggtttggctttcgggttcctgccttccaaaacaggagaggcaacttggcctgctttttcctcagaagagcccactttttgcgtggaggtgacctgccatttgtccggttgggggtccccaatcgtcttcgagctactgatatagaacctctgcgtttagctgtggtttaggaagtgcattcacgtgaagtcgccaagttcaaagggctgcccctggaacccaagtcagacttgccctcgcccccttcccgaacgtaccctttccatgaggctgggcgccctgccctgccttcagtgccaaagccccaggcccacaggctgtgcactccagccgagggcagcctggggaaggtacgagagatcactgggctttgtgaaacctgtcagcttgtgtgaaagctatctcccccaggccccacccccgcccccacccaaagcacaggtcacctgcctggttaatcatcctgggctctgagagctccctggggccccacaggccaagcgttttctgacttggagaggcaggaggccaactccccgctcctcagattctgctgaactaactgaaaccctaaccttcgggcttccccactaatttgtgataaggcctcgccaagaaaaacagcaggctaaagacccctgatttcttcatgaattccagagcacttggttcactccggcagagaaggggccccaggcagccatgcatacagagccacctctgcgtgggtgaagggctggggacggcctcttgggagcccactaaggaggaccacctgcctgctccaggcagattgcttccagctggccagggcagaggagcaggccaagggtgggtcccgggcagtggcccagagaagctgagctcgctcacgagatgtgtgctgacgtggcaagatgggcgggagtcttcatgaaggagtggctgcctggccccctgacctgaggatcctagggcccctggatgggtttgggggaactgcagcatcctcagatcacagacggtgtgtcgagtgagggtggtgctcttcctgggccagcagtaggtttccaaaagggcacagacacagctcaggagatggatgctgccctgtcagagtggggaaactgaggccccaggcggagacaccacccactgcaggttccagccgtcccccaccccacccctgccccaccatggctgatgtgagggaggtggccagaagtccagagggacactgggtgggaccccggtgaagatctggtggactgaggccagagaaaaaggggatgacccattcctagcagggaggaatagtagtttatattttcccccaaaattttatttttctgcattggcctgaataggagctgactttaatacgggggaaatagtgattttaaagccggctttcccatggaatgtgcttctcctgtgactgtgcccatctcctcactgcttggcagagaggtatcccccgtgccccactggcatgggcgccaggtctgcccttccagaggcccctcccaagtagctcccagcagaacacttgaagcccaaaagcagtgagaaagggaacacatttgcctccaatcctgactctccaagccctgtccctgcccccaggtgaagggttggccctgggcatggaggtcggcagcagggaggggacacttaagccacttggttgggggtttgtgctatgccctttcctctgccctgttaggtttgcttctacctcttaggtcctgtgatatatctgcccctgtaggagcgagacagacataagccagatttcaggaaggagcagccatggggcagtggggctctggagcaacagaggcctcaaaagctcagcgtctacagatgttagggacaaggaggcagcttgggggatgtgctcaggccctggaggcagacacatcagggtctgaatcccagctcaggggcccagggcagctcaagccctctctgaggttctgtttcttcatctgtaaaacagggacaatcacggtagctacgtgtggggcgcaggacggcacccaaggatcattcctgtgtgagtcaggtgtcagggaccaccaggccttgtgcaggaacatggggtagtgtccctgggggaaatcctaccccagactcgaggaataaagaggaggaggaggttgcctgagcttaacagaatgatggctgtctgacatgaggctcacaactggccccagcagctccacggcagggagcaggagcagacaccccggatccgctctcctccctccttgcctcctgccaggggtccagttggctagacccaatctgaagccctgggccaggagcttgtggacataacctgcagagatcagcctcctagggcagagtgagctgaatggagaagggctgtatgcagaagggcgagcagacagagcccaggattccacaacggtgtcgatgtacaacaccaagcacctggcctggtgtgggctcgtcttgcactatgaaggggcagggacgtggccaggcattcgttcctctgtgggcactgtggggctttgctgtggaggcagagggagcatctgatggcccccggggccgcgctagtcaaagcgcttcatttccatcatatgtggtgcaaaatctaaccctcttaccctgcgtgaggttcatgtgaccgctcccgctcacctcccagcctcattgcctccctgttcccctcctccctccccagccactctggccttctcctcgtccttcagctccttccagagtgttcttgcccagggcctttgcacaaatcccttccaggacttccgatggttctgtcctcccctcacacaggcctcacctcttttgccccctccacctctggagcggccactcgcccacccttctgccctgacttctctgtggcttcccaaggctcttcctggcacctcgtagggtaagtccgaccccaggtggctgtgctctgaggccagggccaggactcttgttcacagtgctatgcctgacccggcgccagccctcaggggaccacagccggctgaacgccaactggttagctgctttttctataggacctaccgagcgtttgactctagaaccgggggttggtgcttggtgacaagagctaggctggcttcctactaattctgcagcctctggcttgctagcctcccgcccactagggtccaggtcacttcctctaggagattctaaaacactctggcacagcccaccagcagagccgggccttgggagcgtgagggcacggggcctgagcctactgcatcctcccagaagctggcctacaggacggaggctcagggtggccagttgggcatggggttctgctggcccagagtgccagggggacaggaagtccctgagggctccagctgcaggaggagcatctcaggaggagctgaggccggagcagagcgtcctcctggtcctggcagcccttggcccctcagcaccccagagggccggccgcagtggatgctgctgaaccaccagaaacttaatctattattacacagaaacttctgtgcagtcaggggtttgaagtccccagaagtgtttgcctgatttggggcagatagcggggtgattaatgctcgtgataaggtgttgattggttctgggagccactgcagacacaggggctgttgtgcatgcagggctggcaactgtagtcacagaacaatagcccgtttatgtagcacactcccaccccccgcctgccccaggcgggcacaaagggcgctcgggccaggaacccatgagctgggctctcccggggccgagggtccagacctgttgccgagaagctgcttagcaaggcctaggggcaagggctggtctggcctagctctttctcccttgagccccctgccacagggctaaggccatgctgcgggctcgagtgactgccctggacgtgacaaatctctgtgcctcggtgcccacacctatacaatgggggtaataaagtccccacattgtagcactgccaggtggattaaatgaaagaagatagtgaagtccttaaagtgagatgtgttggcatttactccacaaatactgaatgcctgctccaggtgccagggacagcagtgacaatacaaaactgatacgaaattccaaagggatgtccaccaatgggagacgtataagggctctgcatccatggattcaaccaactgtggatggaaaatgtttggaaagaaagttgcatctgtgctgaacatctgaacttgtacaggctttttgtcttgtcgttattccctaaacaatagagtgggtcacgcagcatttgtgttgttaggtatcgtaagtggtctggagatgggaggatgtatgtggcctccatgtcagtatcacaccatttcgtatcgggggcttgagtacctgtggatttgggtacctgcgggaggtccccatgggtgctgagggacagctgcactttagtatttatctacagagtgcttggaagggaaaacaaagacaggcagggctggtttggggaaggggcctgttgtggatggggtcgtggaggaccttacagtgtccccaaagcgaggtgaatctcatggtgtcagggctaagagcattgtggagagagggtacagccacagcaaaggccctgaagtggggatgggcccacaggctggcaggacagcaaggagacccatgtgctgggaccccgagagctaggacacgtgaagccctggctggccccgagtgcggtgtggttggcgcagatggcaacagggtcactctggctgcagagccaagaatggaccactgaggggctgggacagacctggcagaccaggagggaggccactgcactagtccaggcggaggatggcagctggaccaggagggcgaggaggaagtagtagattcaggactgttttgagagggaccattttagcttcttacggctgctgtaatgaattcccacaaacttagtggctttaagtgacacgtttattatctaacagctctggaggtcagatgtccgacatgggctacattcaaggagccagcagagctggttcccactggaagctcaaagggaggccccacctcccttggcttgtggcctttccccacggcccccttgtctctgcttctgtcctgcgctcttcacaacctcccttcctccctctttctcttatggggagtgcaggggtgatctggaggagccggtcaatagcagcgtggtggggtctggcagagacagactgcagggggcctgggaggccccaggaggcaggtggactttgtccctaggcatccagtgcagaggtgagacctgtatggccacagagtctccctatccaggccccattaccctgggggaggcggattatggtatgaactgctgcaggtggtccaagaggggctgcccctgggagacgcagggttcttcagtaatggtggtttcgaagggcagaggagggaagaatggagggatgggggacagacgctggagccgttttggtggcaggcctctgtggctgtggccagaagcagggctgggcaccaggccagatggaccagaggctgcccccagctgaaccaactacagaaatgagagccccggcccagcctcctcccagccgccgctctctgggagcccagctttgctcatagaaaaggaaggcccttgttgccctgcattgggagcaaacacttcctttggcctcacagctcaaccttggacccaaaggtcctcagggacctgggggaaagagagggcagccaggcacctctgttcacggcaggggctgcgttgcccagcctggcagagggaggcagcccctaggtacagtcccctgtgcccactcgagggggtgctgaattcctcaaggcctgagtcagacctggtgcagcttcataaagccaagggtggcaggcggaatccaaggggcctcaccgcccatgcaccccactgttgcatggagagaacaatgcccaaatgccctcgtcccacagtcggcatgccagacccctcgggaattcaggccttggtgagtctggcacattccggctgtgtgtcagcgggagaggcctgggaaagggagccagcactgcaggccgcccaccacacgcccactcgggcaccggacacagggaaggcggacacccagggcggccatctctcgggacaggaggtgcggctccaggttctcacccaggagagggctttcctcccatgtcagagtccccttcgctgcttgaggcaagccctccggaacagacccatcttttgggggaccctgtggtcatggagatcaggttcctagaatcacccccagcagcgcacacaggagggcctgaggcccagagaaaggcgcctgaagcaagggaggggagggctggtccagagtccctgtcccctctgccagccacccaggaggctcctatggccccatctcccagctcttccgggtggaagacagtggtgggtaactcactcagctagagcgtctgatcacaccactgcagcggctgctcacagccttcaccatcaggaccacaattctgagggccctttggatgaagccatctcacagagctgtctcctgcagagaggagaggagagggaggccgccttgccagcaggggaccagcgaggtgtggcctgcaagccgtgggctcctgtgttccttcctcccccttcagaggaatgggaggaaaccaggcttgagttcctgatttttgccctttagggtttttaaattgtgggagagccaggagtgcctgcgtggtggcctctgtcgactccatttgctctgaagcggggctgcggccaggcagtgcctctcagccttctgtttggtgggtgaggacgatgcttggtcttgcctcaggagcattgctggcacctctcatgtgctcctgggcctctccccaaccctcaccttggcatcccccaatatccaaacaatagtccacaaaacaagctgccccgtgggcactgcgaagaccctcggggccagagccactccctcagggtgctgaggccaccagctggggcctcctctttccacactattcctgacgcctgggctgggcaggggactcctggcttcgtttcttccctcgcctttgctgggccatctttcagaccttgcctggtaccttctctccccgtgccaaggcctggaggtgatgtggatgcagccgggcagtgaggagcgcaggcgaatgttacagcaggcgcgagcgaaggggcccgaggcaccggtgcttccgacggggcccgagggccgtctgacctttccggccacggggcagcagttgcgtgagcaggaacaatcgccccagtgtgcaaggcacaagcggccttttcttcctcaccgggccggcgcacacagctcccagcctggcttcccttgaacaaacatatttattgtggccgccaccgaggcctcgccttgcagccggagcctgggggcctctgtcccacccactggggcccagggaggggacccctgccctggcggtctcccctgccccatgggccccagccccatcttgcctgaggcaggggtggctctggtcccacccaccctctggaggcccagaaactcgaggctcctgctgggggctggtgaccacccacaggcagcaagccagccagggtcctgggaagagggggtctgggacacagccacacctgagcccatcctccacctggagccagccccttaccttctggagcctcagtttccccctctgtaaaataggaggcatcacccagccttgcacgtctccagtgtccctcagaacggctctggccccgcagctggggtctgaagagcagagccctgagctctgagatccactcccacccccacccccacccccaggcctctctctgccttccctagtgctcctttgtgtgtccagagggaaggggcatcctccatcagcactgaccccactcaggcctctcagctgcactcaacacaggggctccccacactcgccctccttcactgcgaccccgaccctcactttcccacaaaccctcagtctcctttgctcagcttccttccagacaggctggcccaggccctccccacggcttggcttccctgggcggtgtcaggcagggacagcagccataggtggtacccctagtgagggggactcattctagttgcaaagatacaggtagagcatagggaccccaaagagtagcaggggacccccgaggttgctgctggcagctcctagggagacagtcgggcacggtgggcaccttgagaggaagaacagccaggcctgggcagccctgggggaggagccaggccaagtgtgctgccctcttggcctcagatctgaagctatagagcctcctggagggcagaggcagtggagaggggtctagcgggcaggagggggacttcaggccttccacacacacacacacacacacacacacacacacacacacactctctcactctctctctctctctctctctctctctctctctccccccccacttcagggccttcgcgcccgctgttcccctgccctgccaggcgcaccacccccgaaacatgcacacgctctcctcttccctgcttaatcctcttgagtcttcaggcctcaacccacgcttcccctgaacatcctcctcagagcagttgcgcgctctaaatcaggaccaccttgcggttctcccagccccagccttgcctttctagtggttctggcctctgatcacaggcacagtttcaagcttgtctagcactggcaggggtggtcctgctccggccccagggcccgcaggtgtgtgtgagaggtgcatggtggacgtccaaagaataaacgaatgaaccatccaaagcacaggccagaggcagattgggagggtcaggtcctaagaggcctcaggccggagcccagctgcagagcagggcaggggtggccaaaaggcgcctagaaggctggactttccgtgaggtggcggggagcaccaagggtagaggcaggggagcaatggatgggttgaatgaggaagcttcacagccccccggccaccgcaggtcgggggagcactgtccccggggccccgcagccagctgtgctgggcaaggcaggacgggatccttggtgatgggcagaatgtggggagcagggtaggacgggccccttggctgagagccagatgtggggagcggggctgtcgaggctgatctcaggatgcttgctgcggctgctgggtgggggataacaggggttttccgaggccctgaaggactggagagtaggagcaggtctcgggggtagcttcctgaagagatgagtcaggtcccaggcacattcagtgccagccagggaggtgagaggtaatcctggaagctgctatgtagacagaagcgagggcaagaccaccgctcctccgccataaaccgtgttggatgggcctcctgcctcctccagcctcagtttcccccactgtgaaatagggatgacctcctgtgctggggcctggctgtggcttcccaggccccggctgggaccaccgcagaggtgatgtctccaggaggcttctgggccagcagcatgttccagtgcgacacatgtgccccggagtggccgcgtgcccagccggctgtgcacgctgccccaggctggtggggtaagcgcctcggagggcacactaacaagaggcacatgtgccagggaagccctgccttgtcatcacctgtgccgtggctgtcagcgcgcatctggcttacattgaactcccccataaaacgtgtgaaacctgacagcagcgccgcagcaggacagggagggactgtgtgtgagagccagggaagggctgctcagggggctctccttgatggtgaccccctatgagacgccacttgccctgaggccctgggggacagcctggcccctggatggccagagatgcctggggccctggggtgggaggtggggacaggctaatggcaattgaggccctgcccggtggagggtgggccatggccgcccccacctcccctcccgcaagcttctccccttccttcagagcccaaccactgcttgctccttcccacccctcctaggccagggatgcctgaagccacactccactgcattcagccaccgtcctgaagtgcccctcacccacccatccacaccccgcaggcatcctagggcctggcccaccaccctctccctcctcaccattttctgttgagcacacttgaggagcacttggaggagctgggggatgacatgagtccactccgctgtcaccaccaagaccacagtggggcagtttaaacagcaggcattcatcccctcacagccctggaggctggagtccaaggtcaaggtgctgcagggctgggtcctcctgcagcctctctccgtggcttgtagacatcaccttccccggtgttctcatggggccatccctctgtgtgtgcccgagtcaccttctcctctcataaggaccccagtcaggtgggattagggctcacccttatacccccattctgctttaattacttcttataagaccccatctccagacacacagtcacagtcagaggcaggaggaggtgggtgagaggaccccacgcccttcctccagtgtgtctggagccccttccctgtgtacaaagggacagagaagcgagggggctccttggccctccagtatgtgtgtgcagaaggcccatgagctgcctggggttggggggtggtccttatacatactttagatgccagagggggctcattgggcagaacctacctgggaaggggcccaggcttcctgcctgcccttcagtttaccctgtgctcccaaatctgaaggaagcctttcctaaccagcagtccaggggattagaggactgggaccagttgaaactccattctaagtcttggggacctaatgggattaaaggcgaccgagcttgggccgtatctgggatctggggcccaccgggggctgtgaatagttggagccctggagtgccgagggcccaggtcccaggcctctggggagtctggattttttggagtcttcctgagacttgtgaccagtgggcttgggagagcctgaggggcctctggggttagacggtggcccccgtgcctggagagaaggtgcactttggggatgggaggcgctaggtgccaatggccctaggagggggctttggagctggacccttgagggagtcaatgccagctcatcgccatagcggcttgcttagggccgtccctcccaccccccagttacacagcctgcaaaccccaacctagccccttccaggtgtcccttgtgatcttccgccactgacataggtgtggcccagagcaaagggcggcttcccatttcacctgcgcatctgcagctggtatgcggctgccctggtgggttcctggctggctggcatgcgccctgcgcctctgctgggcctggtggggcctaagggtgaaaactcggtcaagataagatgcccacggctcagggaccccacagtcacaggtggggagtggcgcagagcctgggcctgcctcgggctaccctgaagtgccagccgagggtggctgaggaagcccagtcccgacccccaccgcctgccttcccaagacatcctgagtgcccctcgccagcactccctgctcggggatcccattattccaggaggaggagccaggggtaccactttccattagtgggtccagaagagatcccagcgggaaggggcagccttcagggtagggcagcggattagggaggactcccccaggagaggaggaggcaggcagggaaattctggggggagtgtattccacagggtaagcagaggctggatcccgagagcatctggacttgttcccagggcacccagcacagaagtgaaggggtgccggtggagagggagagccccgggcagctgctgccgtgtgggtggatgtccggccactgcccagccacctctctgtcccaggaagctgctctcctggggcatgtgcacctcaagtgggtgcagcaggcccagacccacgggggcccctggaggcctgctggatgcccgcgagctgcaaggagttaattcctggccttgtgggctggcaaactctgactcacagagcaataaaattcttgtgttttaaaaatcagtatattagcttaattttatagatttcagaagtgctacttgaaaataaaagtctcctaattatatttatgatcccaacgtgagtgaatttgactccgttcacggcgaagaagctttgtgtaaaatgccgggaagccttcgtgctgactcggccctcgcagaccataaaacacggctggtgggtccgagcccggcagggatatggggtcacagcaaagtccctattaatgccatgtccacctcgctgccagggagagtggggctgcagcagggtgcgaccgtcacagccctaactctgtgatggatgcctgctgttgtgatcatggacatgaggatgtgaggcggtcataatacaggagtgggctggaggcagggaaaggggttggtgccccctgcccaggggaggcacacctgggggcacagaatgacactgggtcctctcagcttcatccatttcctgctccaggcagggccctgggcctgggctgcagggattcaagggagaaccacaccctcctccactgctgggaggggccgagcctggcctggactgctggccccaggagcctgggcctgtggtcagggcaggaaatggagaagatgaacgaggaaaggagaaactgctccaaatggtggggagggaggagagacgagggcagaagtgagcccctggctcggtgggggtgggctgtggagtgtgggggcacagcgggttccttactgagcccagggggaggcagggtctggagtgtgggggcacagcgggttccttggccatgggggtgggcagacgtgttatcatgaagccgggagatcaaggaaggctctctgagggaggtgacatttgtaccaagcaaggaaagaggcagaagatccttcttccaggctaagcgccatgtgagaatgcagcaggtcggggccactggcactagcgtgtgtgacaagggaatctcaggcttctgctcacctctgctgggggcagagaccctggccagagccatggccaacctccccccactcccagccaggcctagagcagagtgcccttggaggctggaggaggccaagtcagcctgtcccatccctcctgggcccccgagtcaccaggagatgcagggcttagcctggagaggggcctgtgcggttcctgggtgttcaggggtggggtggatgtctgcttttcctgggggccccacagctgggccaggctgtcctcccagcagaacgtgggctgcagcactggccacacagacagaccctggggggattgtccttctgccacctgggcattggcacactggccttccgcagacactcagcaggccaaagagtgggctatcatcagacgctggccccaggcctgccctgttgttgcgggtgcagtgaggtgcctgcggccaggtgggtgagcgaggtgcaggctgtcactcaccagcagggttggggcttggggggaccctggtacaggtggagtccaggggtctgcagaggatggctcgagccctgctaccaccatgctgctttgaaaaaggactgacttctctgctgcctccgcctccctgtgaagtgggactgacatcccctgtcctggggtggccttgagtgtgtgcagtgcgtctggcacaggcaggtaccccacatgtgtgcccagcatgtctgggagggccagggtcgcagcagggcccccacccatcctggctggctcatacttggccactggccacaggtgacaccaacccagcccctgtgtgaggtactgagagcccatcacacagatggaccaaccaaagccacagatgacaggtggcaggcccgagattgcctgaggtcacatggtaacacatgtgcacccggcagttgtttctgccctatctgtggttcccagccatttggatgtcacagccccatcaaaggtccgctacatattcccccacccccaaaggtggatggacataggtgggcaacatttttattacgcaaaaaaggacatttcgtagaacaacattactctaatgaaataccaccatttcattctagaaaggctgaggactccatctcagaccaggggctggtggtgtcctggttttttaacaagaacttgttctcactctgccccagcgtttgtcagcccagccatggctcctatccacggcactgggcccgcagagctccaggagctgacatgctccgtcttaaggcaggtcggctgctccgaggactgccggccctgtcagtatggtgtccttgcccagctggtattggccaagttgaccgtgtccaggggacagagagaggggaggggcaggttgttggaagcctttctgcagatgtagcttggagcagtgtcctaagggaggccagcccctatgggtcgggacagaggcctcaccagtgggatccagtcactggggctgaggcctgggtgtgcaggtggggtggtgagccatgcggcagtagcccctggggactagagcaggctccttgtggagctgtgcggagctggccggcctggtccccgtggcttcaccctgagcgtgctgctgcctaggccctgaacagacagaggcaagccctgcatggcgcccagggtgccagtgactctggttgctctcaaaccatgagaaacgttagaacttctttacccctctgtgagatgggctgggcctggcctctgaggagcctccaggaatggcaggagggagggtgggggatggggagtgggtgctgctgcccatcgacgctgctgggcaactaacaaattcagcaaattcttctttttattgtgtatgttcgacaactgccttcacttaaagtcacttttttctggctctccaaatatacttagataaggaaacagagtctatttaaggaacaatgttaagcaaacaatagtacaggtgttcaaagatatggaatgagtgacagatggggcgagggaccccgatgcagccccacccagaggacagcgcacgcgggctttgaagtccttcctggcaggccccgaatgtgagcgggtggacccaggcctcctgggggcctcagctcagctggagccagggtctctggaggggcctgggttagtttcctgtggctgctggaacaagtcgccaaaattttggtggcctaaaatcaaggtgtcctcagggctggtcccttctggaggctctagggagagtccctgtcctgcagtttcctgctcctaggggcgcccacatcccttggatcatggcccctccttcaccctcaaaggcggctgcggctcatggcatcctcacatcacagactctgtgcgtcccctgcggccacgtctcctcctctgactctgatcccctgcctctttcccgtatcaggacccttgtcatcacattgggccacccagagaacccaggattttctccccattgcacgatcagctgcttggctgcctgaattccatgcagccttgattccccttcaaaggaaatcaagtggcaaaggggaattgagtgacgcatgcgtgagttccaaggattagggcatagactcctttgggggcgccctggggtggggggtgttcctgtgtctccctgcagcccctgcttggacacatgaccagctcaggcagtgctgcctccgggggaagtcaagagtctctggtgagtctcagacaggcctcagagtgtctcagggtggcctcagagacaggggaggcccctatgagctggagggagtgtgaggacagggcctcctgtgagagggcaggtttgacttttactctgccgctgagtgactgtgtggcccaggcagtcaccccagagaggtctgactggcgcttgccggggtggctgtgtgcagcaggcattggggccctggagatatttgctctttctttttgttttattatccagacttgcaaggccctgtgtgccccctcggggctgcacacgtgtacgcacaaacgcatgcccagtgtgacccctgtccacacctggtgcctgtcccctgtgcccctgtttatcccttctacctacagcctatcccctacccaggcccagccctcccagctcaccctcttccaacccaggcctgagctctgttcgggtctctatcctcctgccctttagcctcctctcttactgatagaacattccagagcattccaccaccactggcctgcaattatcaccccatcgctgtgagtgggggcaggctgaggaagctgtgctcgggccggagcacagccggcctccttgcaggggcagctgcgggcgcgcagacagctggggctgggagcctcttccagggatcctccgcctgtggttttcctccttgaccttcttaggagggtccagttccttctcctggccaaggccccactctctgccaccccaggcagggccagggtgggtcaccatctgcagaagccctcaggggcccccagcagcgcccctcctatccccctgccccagggcgggctgccgccttgtaacccccagaactcttggctctcatgtatatgagtcagcgttgactgtttaacctgttgcaagacactctgctgggtgctgcgacatggttaggttttctccacattagaaggtagaaggaagaaaaataagttctgaaagaaacagacttgccctgcctctgccctgaccttgaggtgaacagaggttttgcacagaacgaccatccctgcagcgggtggcttggggggtaccaccatgatttgagaccctgggtggtgctggccagaatcagcctctatgagatgggcagggcagtccagggcaggggaagccctgtgccccaagatcagatacatcagctacaatgagaggcatcaggcggcctcaggccctcaagccggtccccatgtgcccatttgcagtctgtctcatactcacggccacctggccactgcaccctgatacagcagtggggccttcatgcctgtggggtgtctgcctgcccagctgtgcccactcatgtggtggattcatcccaatgctggtcctgggggccctgggctccccccggccctttctcggggcagtttacactttgcagctgaatcaatcaggggcagaaatgcctggcaggggaatgtttaccgatttggttttctggggctgaggatgctcggtgtttgtccaggctctgtcctgctggctcctctaaagctttgcaaacaagagcctcggagagaaggaggccttcccctccccatgtgctgaattcggggcggtcctgacagccatgcgcgggggcccgctgtggcctcctctgcacggctgctgagggaatgcaggtcaaacaaagtaggccagcggcttagggacccccgagtaagcaggcagacccacaggaaatccagtgctccgagcccccacacctgtggtgtggcagccacccagcaagactggaccgagaggccacgtgggcagccacccttgccaggtgggcacagggagtgcaggtggtttgttcttgcctcagatccaggagagcagcttttttgcctgaacccactcgtgaatttttcatatttttggagagctccttgtgaggacagccggcctgagcaggctttgatgaacattagagcaggtggccacaattgggcagatctgggcctggagacccagttgtcatgtttgagagggaaggggcattcccagaaatcacagggatgactggtgtgagcccaccgcccacctagactcccgtaccatgcggggcccctcattgactccgagggtcttcaaggccctgtgctcctccagaaggtggggtctgaggtgctgctgggtgtctctcttcacctcttcagaagcattcatgaggtaagaccccaccccttcaggccctggcacaggcctcagagcaggcccaccacccaactcactggttcacttaggggtagaaattatcccagcttttacccagagctcagggcccaagatgtcagtttgcctgccggctgttgctctgactgtggcctccctcccagctccccggcatgcagctcccagagggagaacttgagcagggaagggaaggggctcgaatccctacgccagtccctgcatggccctatggggacttgcgtctccccggaggagagcagccctgcgcagccctctcttactgattcctggagtctgcacagctacatagggtcagattcacgacctcccagctttaaccagccttcttgattagccgccatctaaggcccaactgtgcttcgtgacaggcctttgagcctaaaaggagttgcccccagcaatgacatcggatgcctgtttagtcagcggactgcctcagaaaggaatctcacaggcagcgggttcttctggtagggtgggatatttcagcgggaggtaaacaggtgttgtcacagaacggcagactggggcctcccctggtgggccttgagggtgctggcctgcagacctgctcctgcccgttctggcctgatccggggcctcttgactgcaggtctctcgtgggctctcagccccaggtgcctgccctcacccacgtagcttgggacatcatcagcccattgccggtacccatggtaccttcaccaccctcttggccgcattctgaaaatcaatgtttagtccctccttgaacttaaaaagtcaaacttaaaaagagattattacagggagctggggactcaggcttgcaccctgcctgtttaggataaaaggccaccgtgtgtccactctagtgtctctgctcaaacaggagacgatgtggcatcgggaacaccaatgcggcactcagagaaggctcttagccagctggcccctgatgggctcactggctgcaccagcttgtgtagcagctgagctcctgcagagccttctgggagggaagaatgtgtttcttgctccagtactgcagagcatgtgatacctgcaggggtgcaagaggtgcctgagagcaggcatagccaagacttgtttgcggttgctcctgacgcagagccggcacatgaggtggcgttccctcactctctcattcattcatttattcgccagtgtttcctgggccccatgccatgccaggtaccttactaggccctggggataaaaaagaggacaaaagagatgagaccttcatcctagagcttaggatgtgaactgcgtccttctttaaatggaaatttctaaattacggtgtaccgaatgcatccacccttggcctcgtcacatgtgctgttgggcagtattttcctacattttcttctgtgaaatttataattcagcctttgtcattcaggcctgtcgtcgtgtccaggtgcacctttgcattcggaagaatccagattccttttcctccgtggagtgactccccttccccacctgccctgcagccattccatcctgtctatggtggtcgatggtgtcatctttgtggtctagtgtgttcccgagtatacaagggtgtgtgatcggggctccctctttgcactgatagtctgctggtcggaaggacaatggcggcaccccaagacctgatgctctggtttagaaacgggttctaatgcccagaagagctcctaaacccctatttataataatctctttttaagtttgacttatctgtttgggacctttattcctccatgccaactttaaagttaagtttattgcatttcttaaaaatttcaactggaagtttgcttgggattgcctcgaatttgcaggttaaatttgggaaaaactggagtctctctcatgttgcgttttctcctccaagaacaaggagtctctctgcattgagtcaggccctcttggacctctgttgccatcttttcctgaaagggctggtggggtcttgcttccattattcctggatgagaccttctttcccctgctattttggaattttttctcccaggagtttattgctggtataaagaaatgccattgatttgggggggttgatctcacacctgacaaccatgtcatactttctatcagctctattgattgatcttttgatcctgctgattgtctaagtggatcggtcctatcaggaggagtcagcgtgaccacaggcccccattccccagcccctaatgttcttgcctcatgtcttcaggtgcggggctggcagaggctggggttacctgacacttgtcatccttctgctgggcctcagcacccggcggaggcaggggcttcctctgacacgatacagggatttgctgacggttccttgtctgctcactaagcgtgccttggagaaggccgctcagcgagggccgccttcaggcctgagcccggggccaggaccaggagcaggcggcagcagcaaggcagctcatcctcggctgcctcttctccctcactactatttggtttttgttttgttttgttttgttttttgagatggagtctcattctgtcacccaggctggagtgcagtggtgcgatctcggctcactgcaaactccacctcccgggttcaagcgattgtctcacctcagcctcctgagtagctgggactacaggtgtgcgccaccacacctagctaatttttgtatttttggtagaggtggggtttcaccatgctggccaggctgatctcgaactcctggcctcaagtgatccatccgcctcggcctcccaaagtgctgggattataggcatgaggcaccatgcccagcctcttgccgtcattttttttattttaaataaactttgattttagaatagttttggaattacaaaattcttacacaggtggcaccaagagtccccaggtgcccttcccccagcagccctattatcagcatctcacattagtatgcatttgtcacaaggaaacaacagtgctacatgactgttaactgagtccatgcttgatgcagatttcctcagtttccctactgtcttttttctctccccgggccccacccagggtcccatgtgacattcctcatccgtctccctgggctcctctgggcggtgactgtttcccaggctctccttgttggtggtgacctggacggttcagaggaggacaggtcaggtgtttgtagggtgtcccttactaggatccgtctgctgctgtcctcacgattcgactgggctgtgggtgtgaggagggagagcacagagggaaatgcccttctcatcgccctgttccgagggcccatcctgtcggtgtggctcgtcatgggcgatgctgtctctgtctcctggctctgaggccgtggctgtcaatctcttcaactgtgatttgttcttttccccctttgcagactgtccttggacccgccagcatttggctctggggccctagagagaccctgggatgtggatcacactggtgacccctgtgagccccactggggacagatccaggaagggacctcctgggaatgaggtctggcctctgcctggatcaaagccatggcccccattccccggggatagggaagctgtgcaggcagcctgggtaatgggccaccgccccaggcaggcgtgggaatccacacatggcccttctcaaagacgggtgctgtccctggggctctggcggggtcctggagcctctctcattgggcacatccgagcccagcctggcccatggtggaaatgcaaatctaattagtctggcattgagcccgtcttaaaagtattaacagagccttaaactgtgctgttggacggggatgaagaaacgccttagaaagaaattaccggatggtgacaaagccccaatttattagtcttctccaatggggactgtgcaaaggacattaattactttaatgggacttattttgcttcgttgcccaaagtaattggtttattaacctctccttccctttagggagggagggagggaaagactggggcctgggggtggccccgggaggggctcgtccagccttctgctcctctgcccagcggtgcagccttgcaccctggggcagccggtgcttggtccctgctggcctgggctggggctgccccagtgcccactgatctattcttgttcactaggcatccaccgtgtgccagtcactggaatacggccatgagaaagacaggaccctcaagaaacaacctgttccctgaaggccataagttcactgttgtcacaggtgcccagaggaaaggaagatggctttgggggtggacacgtctgggcaggcttcttgcagaaaggccacaggctaggatggtgggaaggcaagagaatgccgggaaagggaggactggttgcccacagggagtgggggtcatgggggcaggttccagagatcagaaggaggtggtgggaagaggcacgcagggtgaggctggctggaggcaggtgaggcagcccagcctcaggagccaggaaccagcttccccgggctttaccagatggggagcgataagggctgtgtttcaaaacaatccctctggcgtgaagcaagccgtcttgaaaacagaccagaaccggctgcttccaccaccagcagaatacttcaagaagaccactcgggcctagggctctgcaagcaatatctgattttcagaaaaccatggctcacccacactctaccctaggaaagggcaggttcccagggctgggcttgtggccagtgcagcactatcctcagtggcctgggacacccagaactggccaggaaagacccctacacagacccccagctctgcagtcagccctgtctccttgtgtccccagacctcgggcgagggagaagcaagttcccctcaggaatgctggtgaagctggcatgcccccaccccctagctcaccctgggtccacgcagggcctgctcccagagtgaatcccagaggtgtgcctgccccacctgtcccagtaagggtggttgtgtgtgttgggtagatgtggtgaggtgtgctggtggggagggtccctatcagatgcccctgggtacctccccaggcagggccctcagcacctgatgccaaaccaggctccactcttcctccaggtgagcccgagggcccagctgggcgtccacgtggaggtgtggggcccgggtgggacaagcctggcaaccaggacccagcatgaaactgcaggtgcaggagccccagccagcctggaatgtgggggctcagaggccacccagagcccacagcagggactccccacgccaggcccggctggatcacagagcttcgggtccagccagctgctgctgcccctccctctgggcctcaagaccatctgtcacgtgacaggggcaggctaggcctttcttgaactcactgtgagctacagagactgtgttctggccaggtgaatggtgcccctgggggccaagatccccacctctggtctggcagctgggtgtgcaggggcagccccagacctccagagtgccctcttcccctctttgcggttgtcaccctgtccttgagtctaactggggctgtgctgcctttgacgtgagctattcaaaatggcgggaggggcgaggcctctggagcaaggaaagagagtggtggctgtgtccagcaagtccctgttgccactgatagcataaaaagtaactctgaaacctggtggccctacagttgacacacatggggccgcaggaggaaggaggctcaggccaggccaaacatcagagacctcaggtctgtctcctttaccaaatggggggctgttccgccagcaccccagtagggaggatgagaggatgccatgatttccagggtggtgtcagaacctgtctgccagggctctgcagggaggggtttggggttgagattgggagacctagaaatcgaggggtgtcgggggcctcggctggggggcaagcacagatgaggatggaagcagctcagtgtcactcagtctgcactgggaatgggggatcccaaggccagggctctgcctggtgccaactgtgtgaccctgggcacgctgctgagcctctctgggccccagttcccttattcgtacaacgggaatgatcgaggagttaacatgtgtttaaaagcaccgaggcttggccgggcgtgctgcctcacgcctgtaatctcagcactttgggaggccgaggcgggcggatcacgaggtcaggagatcgagaccacggcgaaaccctgtctctactaaaaatacaaaaaaaaaaaaaaaaaaaaaattgtccgggcgcggtggcgggcgcctgtggtcccagctactcaggaggctgaggcaggagaatggcgtgaacccaggaggcagagcttgcagtgagccaagattgcgccactgcactccagcctgggcaacagagcgagactccatctcaaaaaatatatatatattagctggatgtggtggtggacgcctgtaatcccagctactcaggaggctgaggcggggaaacacttgaacccgtgagttgagatcatgccactgcactccagcctgggcaacagagtgagactctgtctccaaaaaaaaaaaaataaaaagtacaggggctctacacggcgccctgagaattgtgtgtaaatgagtgaaaatggggtgagagggagggagtgggaacagccaagaggccaggaagcggagcctgggtgcaggggcatcttgctggtgaagctggggagagacctgcgcaaccccacctgagtgaggcactgtgggcccagagtccaggtcagcgccaggggcagcaggggctggatctctggggaagttgaggaatgacatgtattccagggaagaattgggccggaggctgaaacaggacgacagagccctcagcccagggcggaggacatgggagacgggggtatagctgttgggcttgtggctggcctggcctaaccagttgggggaatccatgggaggctttagccctgctctgtgaactgctgggccttccttaggggccctggggagccttcccagcagaatgtccaggctcctgctggcccaagctccaagttctctggctcccagggtctgtgtggaatccaccggtttcaccccacgtcttttcctctcctgcctggtaaccctctctgcagaggccctggctggaccagttgctttgcaattcacaaggctttggaaggcagtgctcacaaatcacttttctagacgaagaccagtaagaagcccatgtcattcttctgagacattaggggttttctctcccttgttttaatcaaccagttcccaataagtcatttcagtcaggccattaccaatggctcataatctcctgggctgctgggcgaaatgggatcccctggctctttcactgaaaacacttttcttgttttctttctccggcatgctggaagccggccaactcgccagttccattaacttaatgagggctgacagcctgcgacaaacgtcctcataatctccccaggatttaaacggggtcctccccagctgcctgcctacaccccaacctcgaggctctttacctctgtctgtgcacccacccagcccctcctgggaaaaagccaggacaaagatgtatttcttcgctagctccttcctggtggctctgtgcaggcagcctcagacctgtaggccctctgcccaatttgggtcacccacagcccccgcaccccacagcaatttcttgggagctgatcatccccaaagcttggaactacaaggcagtgactggttttgccgggctccgctcgtccctctgagcggagggtcaccctggtcaccatgaaaactttatcctcatccacacctttctttctccaactagcatgggaatcagtttagggtcctcccacaccctcatccaaaccctcatctcccaccccccacttgcagagaaagccccacgctctcagcagaaacggacgccagcgtttaggagcgggtgggctcccggaagggggctctatgggaaaggggaggcaaggctgagcagctgcccaaagtgagcatctgtcccacgttccacccccaggaaaccctctctcctgacgcggggacttgcgtctcagtgcagagggcagtggagggacagtgcagctccgaaatgagcatctgagttcactgctggtgggcaccatcccggccaacaggccactagtgtgttctccctctttcaaacggggcggcgaccctcgtctgacaggcggctgttctgagagcggtggctgtcccagggaagccctcggtgagcgtagcgttaccatggtttttaaattaaagcatctgcagatgcgctgtgtccctgcaagggcaggcagatcgggaccccagggactggtccccatagccaaggtgttcagccgccctgtcccctacacagagtgcctctcccactggctcagggtgagggcaaaatggcacttgcagaacatgaggcccggccagctttgccctattccccccatagcatggctgaccttcctctgagcccctcgtggatgcccacacacggcaagacgtttcctcaaagatgctcttctgcaaagctgcactttctcggttgccgctgccaccttggcacctctctggggtaccttgtactgccctgtcctccccacgccctgaggggccgtcctaggcagcactcaccctggtcatccctgtttccaccacaagactgtttgtagccgagcttgggagttgtgttgtgtagtgttgacttgagttgcatcgtgttgtgttgacttgagctgaactgtgctgagtgttactgagttgaggtgactgggttgattttagcttcacaggtgatctgaacccagctgagtggcttccatggagctgatctgaacccagctgagtggcttccatggagctgatctgaacccagttgagtggcttccatgaagctgatccggactaagctaaactgagtttcattgagcagcttgtttagctggtgtgtgccaggtggtctctcggggggtccgatgggatacctagtgtcttaatctgttcagtctgctataaccaaataccttagacctggtgattcatacttaggaattcattgttctggagactgggaagcacagggtcagggcgccagcagatctggtgtctggtaaggggtctgtctgattcatggaagtcagcgggctgtgtcctcacgtggcagaagaggcaaaaataaggtgcaaacaagctccctcaggcctcctttccaagggcacgcatcctcttcctgaaggctctgccctcacggccgaatcacctctcaaatgcgccatctcctaacaccatcagggctgcgggttagctttcgacatagggactttgggaagacacacacattcagactacagcaccttgctcctggggaaacagaggaaactggttcctttctttcggttctgggttatgtcaaaatgagttccctttgctgaatctgtttcagccacctctcccgaggatcctcgcacaatttcactgccagccaggaaggtctgccctggctggtctgggcttgaggaccagcacgggatcgttctcctctgtgggtcgctgatatgaaaacaatctcacaaagacgtaagaaccacacatgcttagtgtcatgtgtgatgcatcaacccagggggaggagagaacgtgcattcacgcagaactctctcagccacaagctctgtttctgttgcatttgggccaggttgcgaggagcctggcaggccacccggccagtgtggatgtcattacatgagcagtaggaagccatacagtatctgaggcgggggagtcacgagatcttcagtctgtccctcggaaagcccctcctgccgccactcagggggatgggttggaaggggtgaggctggagcccaaatagggagttcagaggcctccgtgtctgcccagggaaggagggaggccagcttcagctgctgtcctgagggttcctgcctgggtccctgatccccctgagaaagggctccctcccagaaaaggcatgtgccctgggcagagccaggaaagctggggatgtctcaaagcctccctacctgctctgtgtcccctccctctggagcctgcctctctcccgagcaaagtacctgccacctgggagtgatctgggacagtcagatgcaccttttgaagtatacacctcagtggcttttggtatattcagagtcatgcaacttcacgactctctaactttagagcattttcatcaccctcaaaatgtcccttgcatcccaggtacaaagccataccaggccccatggggatggcttgtgactgctgcacatcctgcccctggaccttactctagttcttctttcatccactggtgtattcctttggccggggacacacacatttgagaaacttcccagcttccctctatctgaggctcactccattacaacacaaggaactgagacatctgtggctggttttttttgttgttgttgtttttccaaattgtatatctgataagggatgtgtatccagaatatacaaagaggtcttacaactcaataatgcattgacccaattaaaaaatgggcaaaggacttgagcagacatttctccaaagagcagatacaaatggcaaatgatcacaggaacacatgcacatgaacacacgctcagcctcagcagtcattaaagagatgcagatcaaaaccacagtgaggtttacacccagtaggatgactaaaacaaaaaagacaataacaagtgttggcaaggatgtggactgccagagcgaggctagccatgccatgtatctggaggagggccctggaggggtgtgcccattgcatgtctgtgtgttcccatgcagtgggcacaggcagtggtgccagaaagagcctctgctgggctttctcaccaccccagcctctcacctgcagcccaggcatcctccagtgggtttttcagggaacttaacatgatgagtctaaaatttctatggctgaataaagaactgaataaaaataaccaagaagatcaaggaagggccctgccttccagatatcaggatgtggaagaggctatactaactaagatgttgcagtgtaggcacaagggtagacaattagcccattatcccagtggacaagacagagagccctgaagagatccatacaaatgtgggacattggcatgtgaccaaggaggtgttgcaggttgctggaatcaatcatcctccagaaggaaaaagctagagttgggcccccacctcatgcaatctataaaaactgactccaggtggatctaggaattaaatgttaaaagcaaaccttaaaactcttactggataatatacgtttattagtatcttttataactcggcatagggaaatatttattttacaagacacaaaagcattgactgtgaaagaaaaacattggtcaattcgattttacaaaataagaatccctcatcatccaaagataccttaaagaacgtgacaagttgcagactggcgattgcactagttttctggcactggtttaacaggtgacccccaacacacatcagaataacagacgtttactctctttcacttctgtcggtcagaggtccaaccccaggtctgatggggctggagggcgtcattagggctagaggtcctaggggaggatctgtgtccttgcctttttcagcttctaggggttgtctgcattccttggcctttagccccttcctctatcttcagagccatcatgttcctcctctctgacattttttttcgtaatcacagctctctctgaccacagccaggaaagagcctccactgtttgttgttgttgtttttgttgttgttgttgttgttgtatggttttgctctgtgacccgggttggagtgcactggcgcaatcatagtttactgtaaccttgaactccctggctcaaacgattcttccacctcaacttcctgagtagctgggactacacgcacgtgccaccgcgcctggctaattttgtttaattttgtgtagaggtggagtctctctatgttgcctaaactggtcttgaactcctggccttaagtgagcctcccacctcacccttggccttccaaagcactgggattataggcatgagccactgtgcctggccagggccttcacttttaaagacttgtggttaattgggcccacctggacaattcaatatgatttccccatctcagtgttcatgaccttaattacagatacaaagtcccttttccatataacgtaacatattcataggttctaggacatctttgggggagcccttattctgcctaccaaagaaatggatattcacaatacaatgaattgataaagaattggtgtatgtataactaatacataacatgtataatgtatttatatatgtgtgtgtataaccaataaaatcactaatagaaactaaaataacgaatcaataaatatacaaattatcagacagaaaaatggccaaagacaaagacttgttctgcccttcatggtcgaggaacacatgtggccagtgagtacgtgaaggcaccatttacagaaaccatttacaccactccattggcataaaccacagtctgaccattgggagcggtggcagggatgtagggcccagggtctctcctacattgctgatgggagtgtacagtgggactaccactttaaaagggtggcatcacctccaaggtggtgaattcacatacctgttgacccagcagtcccatatctgggcatacaccaaaagggaactctggtgtgtggacgagtgagaatgaacaggagtgtgtgttgcaacgctgttcacaagctccacgtgcaaccagccacttgcctcccagcaggagggagagtgagtaaacatggaatgcccatacaaaagagaattttaaactaattaaagcaaacaagccagagtgacagacaaccatgtgggaaggcttggcaatataataccaaggaaaagcccactgcattcttatcaagtttaaattactaaaattaaaaaaaaaaaaaaaaacatgacttttgggacacatatagtttcaataatattatattaaaaaagaaagcaagggagagaggaacacaggattcaggttgatggttacccaggataggggagacaaggatacagttggggtggagctgtcagggtccagcatttattttgtgttttgtttgtttgtttttgtagagatgtggtttggccgtgttgcccaggctggtcttgaactcctgagctcaaagcaatccgcccaccttggcctcccaaagtgctggaattacaggtgtgagccaccacacctggccgtctagcgtttattttgaataacgagtccttgggagctttctacattgtttttaaaaactaattatatgacattttataagaaaattatattagcacaaccgggagagatttattctaggtaatgcaaggctagttaacattcaaaacttaattaatgtgatctattatggaactttcccaacttgatcaagagcatcttaaaaaaaaaaaaaaaaaaaaaaaaaaaaaacccacagctaacatcacatcacacttaatagtgaagaacagaatactttccccctaaaataaaaaagaaggcaagggtatctgttctcaccacttctattcaatatagtactggaagttccagccactgcaataagacaagacaaagaaatgggacatgtagattagaaaggaggatctaaaactgtttctatttgcaaagatagaattgtctatatagaaaatcccaaggaatctacaataaaaatatctggaacttaggagttcagcacacaaaaatcacttgcatttctatacactaacaatgaacctgtgaaaaccaaaattagaaacaataccatttacaattgcgctaaagaaattaaaatacttaggtataaatttaacaaaacatgtaaagatgtatatactaaaaactacaatatgccaatgaaagaaatcaagacctaaatcaatggagagatattccatgttcatgaactggaaaactcaaaatagtaaacatttcagttctccttagaattacctataaatatagcataattcctaacaagaatcctagcaagatttcttatggacatggacaaacttgttctaaaatctatatggaaaggcacatgctgtagattaaaacaattttgaaaaagaattcagtgggagaaatcactctaccaattttaaggcctactatacagtaaggaatcaatatgatttgatattggaggaataagcatgtagctcaacagaacagaacgaggaatccagaaatagacacacgcaaacatgcctgactaattttaagacaaagatgcaaaattcagcggaggaagactcctctttcaacacacggtacaggagcagttggtcattcataggccaaataaataaattaaaaccctgacctaagtctcacactttatataaaaattaactcaagagccaccttggacttaaatatgaagtgtacaactctgaaacctttagaaaaaacatagaggagatagtatttaggatttaggaagggcaaacagttctcacattggatgctaaaagcatgatctgtttaaggaaaattgatgaaatggaccccattaaaacttaaaacacttgttttgtgaaagccccagtgaaggggataaaaatgcaaactatagacttggagaaaatatgtgcaagccacatatttgacacctggcatctagaacatgaagtactctcaaaactcaacagtaaaaaacagcctgtccaactagaagatgggcaaaagacacgaagagacatttcaccaaagaaaataaatagggaagaagtacaccaaaagatgatcaacttcgttagcaaagatggaaatgcagattaaaaccacagtgagcggtcactacgcacctatcagaatggctaaaatgaaaagtaatgatgacaccaaatgttggcgaggatgtggagaaacgggattgcccatctgttgctgctgggaatgtaaactgatgcagcactcggggaaaataatgtggtcgtttcttataaaagtcagcatgcgactaccacacatcccggcaactgaactcctcctgggcatttatcccaaagaaacgaagactcatattcatacacaaaactaaatgaaaatttatagaagctttattcctaactagctgaaagctgagaacaatctatgtatcattcaacaggggaacaggcaaacagtggtgcatccctaccctgaaacactacccagcagtagaaaggaacccactatcggtacaacctaagcggatcttacgggaattgtgctgaggagaaaaagcctcccccgaaaggtcgcatgctgtgtgattccgtatagataacattctcaaagtccaggctgtagggatggagatcagatggtggttcctggggttgggaatggtgagggtgggagtgacttgcacaggagacgcagagggggtctttctggtggggaggacttccattcctcgttgctgtgtgaatctgcacgtgtgaacacaaggcagagccacgcacactgtaccaatgtcaatctcctggcgttgatctgttactccacccatgcaaggtgtgaccgtcgcgaactcacgtagagggcatacaggacctcttggtactttttttttttttcccaacttcctaggagtctataattgtttcaaaataaaaagaagcaaaacaacacactgggaggtgcaggaaaccacacacgtgatgtgcttgtgtctgctgacataagtgctcaaggaagagtctggaaggcctgcaaggccctcatgcctacgaggtggctgctagggggatgtgacgtagagtgacttcagtttccctcttcatgtctcctgggtcctccagcactctgggtttcctctgccaagacccccacccatctgcctctcttcatctcacaagcctgcatgtgtgcagagggcaggggtccccaggggatgttccttccccaaggcgctgtggccacttagagggtcccccaagctcgggcctttgaagacagctctgtgtctcctaggacgcacaggtgtgggacctcactgcgcgggagggagttgcaaagagcgacaccccagcatgtgggaaggaagggagcgagctcttatttccttattttctttccatctccactcccaggcaaagctgataaattcttccttattccagagttagaggatcctccagaaggggccgagagcttgtccaggcagggtggatacaaggggcttgcatctgacttaattgtctggctgggggagaggggacagaggtcctgggaggggctgaaggctcagggacacaggtgaggccagcccctcctccaccctgggcatctccaggcccagccccaccctgagctgtactggacccaagccccaggaccccctggagtcacctccagccctcccacatgccagcccctaccctgggcctcaggatctgcctggatggaggccaggccgctgagctgctgggaatctgttccacaggtgggaaggtcggcccgccatgggcagcccagtccgggaaacttcctgcctctgctttcccacagtgtccttcgatggcccccagtgacgtgtgttgaatgtggcgctggccccttgggcagcccagcagcccccaccccagccagcccagcctgggcagcactgggggctcctggctttgaatttgacctatccagaaacaacggctccttcagtgggctcagcccctgagaccactcagcctgggctgtgtgcccagcggcacttcatgtacgtggacggggcaggcgggcaggcgggcgtggaggagctaatgggtaagttaggcagcacattaacaaatgaaccagcggatgggggtggggagctcatctcattcatctacaaattattaacaataacttgttcattaatgaatgaacaggtgagatacaggtcagtgggtgcatgaatgagtgaggagatgaatgaagcgggtcttttctcagcagctgacccacggccaagcccccgctgggcagcacgtcccttcctcctctcccaagctgggtggtgcgggcagggagagggtccatccgcccttcagtaggtgaggaagccacgggcctggagggtggcccagcccaggcaggagggcaccagccccgggccctcagtgccttcctgcaaccagggtccaggggtcacttccttcacggcccagtgagcccaaggcctccgtcctgccccctgtctcttaccagctcgctcctgcatcagtgctactgaaatgggaaaggtttccttgtcccccttgcaggacatgtgacaggggtgtggctcgcttcttcagtgccccactactcaaagttctaggggagcatacagtcggacaggttgtggggctccgaccccacagcagcgtctaggggtgaatgtttacagctgaagccccatgggtgtgtgttacagggtgctctttagtttagccgtccatagacagcttgcgttagtcagctcagttagaccccctgccttacggcaagggcagaggtctttctgtatcccgaggttcttgccttggcgtactggaagaatcagatcacacgtgggcttggagaatgagtgcaaggttttattgagtggaggtagctctcagcagatgggggagcaagaagggagatggagtgggagggtggttttcccctggcatcaggcggctcagcagcctgggctctcctgcgtccaccccagccaaacccttcatcgttcctccggtcaatggtctgccggcctgtcggtgcctgttggtgcctgtcggtgtgctcctacgctggtgtgttcctctcgacctaccctcaacgtccagccgcttgtgtcttcttctgccgatgtgttcctcttgatgtccagccgcttgtgtgtctgcccactaaggtctcgagatctttataggcacgggatgggagcatggcaggccagggtgttctcgggaaatgcaacatttgggcagaaacaccgaaatgtctgtcctcacctgggtccgtgcacataggccgtagggtggaaccctagccagggacccgcccttctcctcccagcacttccctgcccctcttccgtatcactaccaggaaaggccacttggccccatcccaggcctcgcccaagacagagagagagacaccaccccctgcaaaggagcaagccgggcccttctctctgagaccacagggtggactgtgttcagcagaaaagccaggtagccagcgctgtcaccagagcagtggctgacccacagcatggcctggacagagctgggggcctgggctggcaccctcagccctggctgcttgcagtcccggccggctgtttgcctgtgaaggctccggctgtgttctagggagttggcaggaggggaggcccgcagcagcttctagcggcctgtgaagcagccacggggcatggccctctgtgcagaacaggatctgaggagccccgagtgttctcactggatgtggggccgcatccagaccttggcggtcatggccacaggctcccaaggccctaagtgacagccagtggtagacccttcacggtcaggcacctatgactccccgttccctgcctgctcccaggctgtttggggtgatggaaagaggccaggacgtgaggccagggtaatagttcctctcgtgtgtcaggcctgggaggggggccttcatgagaccatcacggagatcttggggcctccaatttgtcaaatagttttctgttacagttcatactgtttgcgttcctttaaagacgtctttgcccatcccaggtcgtgaaaatattatccaactttcttcgacaggcccgattgcctcatagttaggcctgtgactctccctgggttaactttgtgaccggtgtgtggtaaggatcatggttgacatactttcacaggtgcatccacattgttccagcaccctttattgaaaagcgtatccttccgccagctcgacggcaaaggcgtcttttctatgaaccagtggccacaggagggtttgtgtgtctaatgtcctattccacgggtccccaggccacagaccggtacccatccatagactgttaggaacaggaccgtgcagcaggaggtgagcggttggcaagtgaacgtgatcacctgagctccgcctcctgtcagatcagtggtggcattagattctcgcaggagcgcgaaccctgttgtgaatgcacatgtgaggggtctaggctgtgtactccttatgagaatctaatgcctgctggtctgaactggaacagtttcatcctgaaaccatctccccccaccccaccccgtccacggaaaaagtgtcttccacgaaactggtccctggtgccaaaaaggttggggaaccactgccctattccgtcagacccccactgttcatctgtctgcccacacgctcttaatcaagccctgtggcctcatgaaaccctaggagtgtcagacctctgactttgttgttcttcaagatcgtcttggctattcttggcccttcacgttgttaggaatattttagaatcaccttgtcggtttccaataaataaacaaacaaacaaaaagcactgtgatattgattggaatcatatttaatccacacctcaatttgcagaaaattaacatcttataaatattgagtcttcttatacatgaacatactatatccccaagtcaagttagggcttctttatctgtctctccaatgctcagtgcttttctgtgtagcagtcttacacatctttaaacagatttattttagagctgggtacgatggctcacacctgtaataccaactacttgggaggctgaagtgagaggatcacttgagcccaggagtttgaaaccagcctgggcaaaataacaagaccccatcttagaagaaaaaaaaaaaaataagaaagaaagaaagaaagaaagattgtgaaagcaagacagtaaagaagaaacaaaaaacttttttgaaagatttattcttaagtttctggtcaagtttatggttattgatgctattgtaattgatatgttttattttctaattgttactagcatatagaaatatacatatacatattttaaaggcagggtctctgcattccaggctcagagcttacagcagccttgagctcctgggctcaagcagtccgcccatctcagcctcctgagtagcaagaagcacaggtacacaccaccaagcctggctattttttaaatttattttttctacagatggggtctcactatgttgcccaggctgatctcaaactcctgggctcaagtgatcctcccaccccaccctcccaaaacactgggattgcagatgtgagccactctgtcaggcctagaaatataattattatatatcatccttaaaaccggcgttcttgttaaattcatgtattccaacagtttatctgaggattcttagggattttttttacatgtatggttatgtcatttgcaaataacaaatgttttattttttcctgtccaatccttgtaccttttatctcccttttcctacctttttaacataccagctgggagtttctggacaatgtgaaatagaaacgataacatccttgccttgcttcctgtctcaggaggaaagcgtatcacatttcactattaagtatgatgtctgcttagggtttgggtttttttgttttagtttttgtcttttttttttttaggtaatggagtttctattcctagtttgctgagagttgtgtttttaattatgaacaggtctcgctttatcaaatgctttcttacaatctgttgtgttgattgtattttttctgacttattctgttgatgtgaagagtgacgctgcttggtccttagagggtaaactcagcatgcacaagtggattaaaccacattcgagcatgtgtttgggcacagtgctacatgcagcttgctggtggtggttaggatatttgcacgtatgttcacgagagagattaacctgtgattttttttttctttcttgaaatatccttgtcagattttgatatcaaggttatgctgccttatgaaaatacttgtataaaattgacattattttttccttaaacatttggaagaatttactggtgatgtcgtctagatacagagttttctttgccagaagatcattaaaattccaaatttaacttatttaattaatattgggcaatttggattatttttgtttttgtgtctacttttacatactgtgtttttaaataatttgtatattttatctaaatcatcaaaagtatttttgtttgtaatgtcctctgaataaatgtttctgcacctctaggtctatagtgacattccatctttaactcctgatggcggtcatttgtgtcccctcccccatctgatcagtcttcccaaaagtgtgtctgttttattagtctcttctgagaaccaaattttggctttgttgattttccttaaataatgttcattttttatctcatagactgtgctcttaactttatctcttccctcctactatctttggtaggaggcaaatggtaatttgccatttttttaaccgcttgagatggatttcagcctttcctctgctctgagatatgcatttaaagccacgaggttcactgtctgtgcttatttcactgtactttcagtacctatttggctatgaattttaataccttacatttttattactatttaatttaaactgttgtttgattctcattatatatttttctttgacccctgggttatttagattgtttaatatccaaaatacatggagattccctagttatctctttttatggatttctaatttaattgtactgtagtcagagagcataataaatatgatttgcctgctttgaaatttgttggaacttgcttctgaagtcttgcatatggtctcttttggtacatgttctgtgtgcactagggaagcttatgtagtctccagttgtagggagcagtgttctgtatatgtcaagttgctaatcaggctgttcaaatttgtctctgacttgacaaagctttgactgcttttctatcagttactgacgaggtgtgttcaaatctcccaccattttctcttttagcttttagttctgccagtttgctttatgtattttaaggttatgtttttaggtgcatacaaatttagaattgatctcgtcctgctgaattgacacttttataaataggacatattcttctttagtaatacttaaagtctgctattggttttcctttactagttttcatttggctacaccatgacctatctttttctatcctttcccaacatgtttttgtatcgttatattttaaagtggatttatatagttgtttttaatcatgacaatcttgatcttttaattagactattaatccacttataatgtatgcaatctaccatcttatgcttctttttcatttgtttcatctcttcctttaagtctattttcttttcatgctccaagctggctattttctttgggttcacagctattcttttctactctgtcgtccctgctatccaactcacctattgcattcttcatttccattatggtccttacttttctggaacttcctttttatgtatctataaattttatttctctggtaaaattgtctatcttttcatctattttcttgaacctatttatcatggttattttgaagtcttcatctaaatattctgaagcaaagcacaatcatctgttagctcacaaatctatgggtcagcaatctgggctgcccagttgggtggtctcacttggattcgatgacatggcagtacttgcatggtgatgtggtggtggctgagtggtctctgttgtcctcacgtgtctggagccactgggttgtcagccagggtctctcagctctccttcacgcggctgttccagcaggctagctcagacttgtccatgagccaacagaattctaagagggtaagagtagatgccacaaggtccttgaggctgagcttcagaagacatgatcatttccaccatggtggagatagactctagcctgcaatgggaggaaccacaatggattgtgcccatctttaattaatcacagtctgccctctggccataacttttcgcattctcccctatgcaaaattcactcacccccctcccgacgatacctaaaattctcacccaattacatgtggcatcatgctcaaagtccgacatcttgtgatctgccccttccagcctctgtccaattccttgtcccaaaattaatgctgtaagttttaggatattgatatgacattacctatttcttagtccttatttctgtatcagttacctattgttgcgtagcaaactagacctaaatttagtggcttcaaatattttctttgggccgggcatggtggctcatgcctgtaatcccagcacttttggaggccaaggcggacagatcatgaggtcaagagatcaacaccatcctagccaacatgatcaaaccctgtctctactaaaaatacaaaaattagctgggcatggtggtgtgcacctgctactcaggaggctgaggcagaaaaatcacttgaacccgggaggcggaggctgcagtgagccgaggttgtgccactgcactccagcctggcaatagagcgagactccatctatatgtgtgtgtgtgtgtgtatttttttttttctttgcttagctaggaggttggacttggttcagctaggaggttgttctgttggtgctggctgttagctgaggcctctctcttctccatgtggcctctctaatcagcaagcttgtttgcagggccacattccaaaaggacatgaattatataccgtgtacattccccagtactctttcatcagtgaagtcacaaggtgaccccaaattcaagtaataggaaaacagactccatctcttaatggaaggagctgcaagtatttaaggctgttggaagtaccacacctttagatctgtatgatctctcttttcccttgccttttagtctttcgtgtataaaattgtagatgctcgagggtattatctccctacagataattttattttcttctgccacgcgcaaagcaccttactccagtaggggattgagagaggtggggttaatgtgatggaaagttggcattgcttagtttctggggctgccttctagatagcttctaaaccccaaagcttctctccacagtgccatgcgtctactgagtactctgcttagcttttaccccttcagcaactgctttttgctcagtttctgtgattctcacccacccgtgtggcttaggaattcacaagtgtttccagaggaagttgtgtgaaaggtggctagaggaccagaatctttttccctcgtgtcctggctgtcctgtggccctggactccacatttttatcactagcccactgggcccccaccctgttgggtgtcagtgctccccaaactgacaagtgccctgaggaggaaacgctcggatgcaggcgcagctcagttcatttcctttctatgtgggatcctcaccttctatgtctttcttggtctccaaagcctcacacagctgttccttgctgttggcatcacttagtctcgcagtccctggtgtttccatcaggaaagtcaggcaggcgttagcttcactgccaggagggaatctcctgtggcctccatggcgctgtgttttcttccagtcttttttctatgcacagacacatcatcccctttgtttccttttgtgatgctgtttctaaaaggatctttatttctagaagaaactttaggaggcaaaaacagcgcagcccccttaacagagtggctctggtggcaactttcccttgttaatttgtcctgtagcccctactttcccaagcgcttgctgtttgtggggctacaggacacagcagctgaaaggggctgtgggcatcgccagcatgtaccctcttatcccatttgctgacaaggatcctgaaggcccaagcatagaaagaagttgctatggctgccatgtgtcagcagcatagccatggccaactcagggccctgactcctacctgacccccttctgaatgacactcaaggtaagggtccccttcccactcacagatgaggtgaaacatttcaccttgaaaagcctcttgcccccagcctcccctcgagcccacactgggacatggcctaagtatctccatcccatggagttgaacactctccttgtttctggaaggatccagtctgcgtgctcctcaggcagtgcaggggcagtgaggggatgaccagcacagggtggccactcacaatctcctctcctctctccactgcaggctgcgggaacaccatcgggccaccattaaggtcattcgacgcatgcagtactttgtggccaagaagaaattccaggtaagccctgtgctgagccttcctgccctcagcctgcccctcgcagcctgatgcagctgcccacacctctcctgggttctctcctgcccatagtggagggtgtcaaggcctccgcccccaagccacacaggcaggcctatctgagacctgacagtgcctaccccaccgaaccccagacagcaggcccctcagaggacctatccttggaggcccggcctggaaccagggacacatgcagtgtcttcttcaccaagtagaaggcagcagccgtgtagctcactcagtcctcccgtggggtgggtcgtgcaaggcagcattagtgagagatgtgagggtgacatcagaatgactcagagatggtgcggagcctgccctgagtcaccaagctgggaaggcaggtcccccagaccccccagccctgtcctccactggctcagtgctctcattccctgctcctccaccctctgtgagttgggaggatggagggaggctgggccctgctctgtaagaggtggggtccccttggccaggtgaggctggagctccagggcttccataagctgccctaacttctccaggggcatgtcccccctacagaagccccttagagcccccagagtccatgccccgcagagaatgccattgatggcaggcatgtctcccctcctgccttggggacattcctcggatgaaggcggtggtggggggtactgagtcctggcttggaaatacatgtgtaggtgtgggaaccccgtatcctctgtggtgggtgatccagaaggcaaaaatcacaaagcagggaaggctggggggtgacttgcctgagtcccttggagcggggggcgtgtgacgtgcttgagtgagtgcgtgtctgcaggagcagggcagggtggggcttctgagctgggggcccctggcacctcagccacagcctcaccagtcataaggcacagcccaggaaggctcagcaatgtccgccgaccaccaggacccacagtcggtggcatcccagcccaccaagacttatcctggagccactgagctccctgctagggtctggtcagggcttatgggggcctttgtcaagaggtcgttgggtcgggctgggaagatcatcttgacttcaggagcctgagatgagccaagataatgcacagcccatccagacggactgacagtggcattcaagtctggtccccctgcagccatgtctttcacaccaggccacaccttccactccaggccccaggattgacacaggcccgcccacagtctccttggtggagcccccacccatctgggccctggagccacctcagcctccagacttcacagggcggtctgggtgcagaccctggcacaggcagccctgggcaagttcttccccagctgtgaggggaatgagagcctaagggtttggcataagatcatatgcacgtgcctcacccgggccttgcccccagcaaccccaggccagcacccgctaggctcgtcgtcactctgagccccaagagcagccctcggccaggcccttgccaagagcagtatgcgggccctcgttctggccaccgggccaccatctccaggggggtttcgcatgcacagccctcccacagtggtgtttctcagctggccctcccacctgcatccccccagggaagggggtggttcatgactcaactgaaccaagttgtgtcaaagctcccagcagtgcctgggacctcttgcagtcaaaataaaagccatggcaaatgccactgctggccagtgcccggagatctgcctggcatgttctaggggagatctgacagcccctgtggaccagggtgtctccattctgggaccgtctcctctctctggtgctggcatggagggccttgctggagcagggagctcactcgggggcaatggaagagagaggccagcctcctggcagcaccagtgctctcccagacagggaaggggctgcgtgaacccctttgggactcagatctgggcagggcagtcccccgagggcagaggagaccatgggaagggccagggtgtgtcagttcgctggagaacagcatggtcgtgacagccgaagcagctgacgtcaccccagcagtagagcagagggacacagggagcctcccagggtggggctggtgtctggcctgagggtgcagagcaggtcccagcagggcagagccagagcccaccaaggcttgcagaactgcgccacttgggcatcctgggggctgcttccaaggtctgggggaacccagcagagcatgcagaccctgatggctcctgggcaggcctagctccaggggtggtgtgggcagcttccagctcaggtcaagagatcatccagccatccctttctccatcagccaggaaggacactggcattgaggttgatatcaaggatatcccatcgtgataataactaccatggcttccagtcttgtggtgaaacctcagatgcgtagcctcctggccaagcgtctgcaatttcatgttgttggagcattcgttgaatacctgggagttgcagctctctgtaagtttgatgtggctgaaccaagaaaaaaagcacacgatttctacagatattatgatgccgtcaaagattttgaggtgatgaggaaggctggcatctttcagagtgcaaagtgattttggaatataaagaatttctttgggttgaattacctagaagcttgtcagtgacctgtgttcctgaactgtgaaacatgaatatatgggccaagaaatggtttctcttggtaaataagcaattaacaaatacaaaaagagagagagggagagggacagagagagagagagagatcatctgcgccagccccagcaggccctgtcgctgagccacaggtgaaaaagctggtccctggggaggaacacagtgagccctgcactcccttccagacaggagggagtgggtcccctttcctgtcttaggacacaggccgggaccctgagaatggcccaggaggcttcctgaagcagactgggaaacccccaccccactgtctgcttctccactgctccctggccctgggagccttgcagaaacctggcaacagcaggatcctcgcagggcacagaggctcctgcacaaagccgctggggctccctccgacctcaccagctggctcttattgctgggagcagcatggaggggtggggccagggtgaggggagcagtagcccgtggcagtgaggagctgtgtgtggctccaggggctcccctagcccacctctcaggatgcttcccttcctcgacgcctgcctgtctgcttgcttgcaccccaccccacccccgctggcctcaggggctgctgacatggcaggtgacccctctgcctaccttgctggctgataagtccttggccaaccacccctgtgtctggcccaaggagccggagcctctccacccttcaagtgtgccttgaactccctgtccaccatcagtcagtctggacaggcctgcattatctcggctcatctcaggctcctgaagtcaggatgatctttccagcccaaccccagaggaccactggacaaaggcccccgtgagccctaaccgtatcctagcaggcatctcagtggctccaggataagtctctgtgggctgggatgccaccgggccgtgggtcctcatggtctgcgggcattgctgagccttcttgggctatgccctacaccaggtaaggctgtggctgaaggtgcagggagctctctgctgataggcccacccagccctgctcctgcagacgtgcacacactcaggtacataatacttccttgcccacaacaggcctgtttggaagcactcgcatctgcagaggctgctaacacacacacctacacccacctggtcacagtggcccagagactcctagggcttggttttcccctgccctgcctcccttcacctgcccacaccgcacccagatggctggaggtgccccatgcttcagcttcacagagctctgtggtctgcaggaggctcaccaccatgactcatgccatgttcaatgtgttctgaagagaggcttcggccacagctggctgtgactctggctctggcatggtgctggcttaggattccctgacctttctcaactcccatcctatgtcatcctcactccctcccttaaggcagagcaaggcagtgctcagcatcccatcttagagaagagagcgtagaatctccatcatacagaagggacatacggaagggagaaacagagttcaacaacccgtcctacagaaaggaagatcaaggctcagtatcccatcttatagaagagagaggcagggctcagcatcccatcttgcagaaaggagcttagaatctccattatacagaaaggagaaacagagctcagcaactcatcttacagaaaggaggatcaaggcttagcatcccatcttatagaagagagagacagggctcagcgtccaatcttacagaaaggaggatcaaggctcggcatcccatcttatagaagataccaacagggctcagcatcccatcttacagaaaggaggatcagggctcagcatcccatcttacagaaaggaggatcagggctcagcatcccatcttacagaagggagctcagcattttcatcctataggaaggagaaacatcccatcttccaaaaggggggatcagggctcagcatcccatcttacagaaaggaagatcaaggctcagtattccatcttacagaaaggagctcagtatctccatcttacaggagggagaaacagggctcagtgtcccatcttccaaaagggaggatcagggctcaatatcccatcttacagaaaggagaatcaaggctcagcattccatcttacagaagggagcttagcatctccatcttacaggagatgctaccaggtacaagagatgctaccagatgctaacagggctcagcaacccaccttacagaaggggaggattgaggctcagcatcccatcttaaagaagagagagacagggttcagcatcccatattacagaagggggaatcaaggctcagcatcccatcttatagaagacagagacagggttcagcatcccatcttacagaaaagagaattaagactcaacatcccatttcatagaagagaactcagtatctccatcttataggaaggagaaacagggctcagcatccccttttacggaagagagagacagggctcagcattttatcttacagaagagagaagaaggacttagcattcccatattacaggagaaactgagacctgaggatgttattactagcctgtacataagtacggtttttacgggccagagggtctgcctagagtccaaccccatgcctgcctctatcacagttcttggtgtgtcatttctgggcaatgccggcgatcctggtgcccagtgtggccccaggagcagcaggcccttccttccatggggcacagctgtgttgtgaggacacgggccccatcccagccctcctgatctcaggatctcccgttcagggcccagagagtggctagtgttgccagtgagggccctacctgcttgtgtcaggtggaagaggaaccccctgaacttctgaggcccagcctttggtagggaggaggtctctgccctgtcttgggattcctggggtccaaaacaatgttgggcgggctgtaagaactccaccaagcctccggcattggtggcagaacccctgggcatgtcagaagtgtgtctagagctgaaagtgggtacatggagacctgacctcagggtctccccatctgggaacttgctgcttcccagggtagaagtggctgcatcctcagattaaggtcaccctggtctcaggagtaggaccccaaagagaggtagcaggtgggcagggagggcatgttcccagacccagcccgggccctcaacggtacctgagcttcctcctttctcatcctgggcctcaattgcctccctctgacttgggctggccctgccccacccctccccaccaagccgcttggctcgtctcttgggccttgcaaattccccagcaaaaggcaggaaagccactagctcagtgctaaggtggctatttgagcactaatgatgactaccctgggcctcacccggtcacccagtggcctctcgggatagaggcagtctgttgtcctatgtgctggcttgcctgcagggccaaggccttcctaggccatcaaacccctgctcagcctggctgctccacctgagtgaggcccttgggagcaaggccacaaatgtggcttggggtttcctgatatcatgagatgctttgttttctctgttgtggtttcaagatgtcacctgagtcccacttataggcttagagctggcaacaagcctgggagccctggggtcccctgccctgcctcacatggccccagccccactgtgggagcccaagcagatgctcgtcacccacagcaagtgctgcaggctaaggccgtcatctggggccacccctgctgcctggcacaaactgccaggaacgatgcagaggagacccgctccctaccctgaggacagtggcggctgcagccagtgagcatgtcaagggtcagtctggggcccaggtaggtagtgggcatgcagagctgtgcctcctggtcagtgcctggcactgtgctgctccttgaccccttgggggggccagctcttcctgaagccattgagaaccagaactggtagcctggggtggtggggggtggaagggaggagacagcaggcccctgccggtgagtagacaggaagctgggacccagagaggccgagctgatggcccaggactacccagagacccatggccaagctgatggggacaagcttcgctactgtgcacgcttggaaccaggcttatgccatcaccacataggcgagctcccaggtcttcacaagcctcccgagggcagacactgtcactgcctgcactttgagccacatggctggggcacagggaggagaagtgatgcgtgtctttttgtcccgcagcaagcgcggaagccttacgatgtgcgggacgtcattgagcagtactcgcagggccacctcaacctcatggtgcgcatcaaggagctgcagaggaggtgggcacggccaaacggcagcggggagggtgcccaggtcctgcccagcccggccccagctgcatgatcagcggtgccggaggagggaggggctgagaccctgagttcttgcctctcaaccacccccttctcctcaccacccccagccctgcagagggagggcagctggccacggccacggttcacagccagcccaccaggcagctctaccttgttccccgcccggatctgagatgatgggggaattggggtaggggaggcgcgtaggggaggcaaacacccgcctccgtccctgctcaggtagcaacaccagcttcacactccccacaacttcaggacactcggcagccagcccacccgccttccctgtcacctctgagcaaggggccaggcccagccctgggaagacactgcctggtgccaggccccaccgcacgggtctcccccagactggcctggagctggagaccctgactgtggggagctaatgtgttcccatggagctagcaccatcctcccgggcctgcacagactcagagcagctgtgcctccgagatgggctcgcctgggaactagctccgtgtgttacagggcatggctgggagcccgtgtccatcctggccacaggcgaggggtcaggctgccttgcccatggctgatccactgcctcccactcctacccccagggaggaagtctgagaggcagcccaccgactccccctttccgagatccctgctcagccccctcgggagcatggccctctggggggttgggagtgacctggcaggccttagggtcgggggtgtccccagagtgggtggacagtccactgtcttgccgggcacgtcaagctgtctgtcccacagacgacagtgcatctgcgcagtgccagggccaggtgtgaactggtgtctgtgtccttctctccaggctggaccagtccattgggaagccctcactgttcatctccgtctcaggtgggtttctgtgtcagttactctgggcccagcagcctgcaatggactctcccgcacctctgccctcctggctctccccatgatgtcagaatgggccattgcacctccaaagtgcatgacatgaaatgaaagccagggagtaaggggaggtagaccccacccttagcaaagtggctccaaagtacattttacaaaggaatattcaggtttcataagaacctacctgggtccctttaaattccagggcgttgaggttaggctctaggtgtggaaacatgaacccagggcaactttgcagaagggggtgatcctggggtggggtttgggtggggtgagctgccagcccagaattcaagagactatgggtgggggccttgcagggctcaagttgagagggacagaagcacctggctgcagcctgggggctggttttctggctccttgaccaaattccttgggtcccctggacacggggctgtgagtcattccggggaatgacagggaaaaggcacattccctggggtttccctagcccagatgcaaacagcagccacggctcatagtgtgggctggtgtaacggagcagcggaatggctgtgcccccagcctggagtcaggcctgtgtcgccctgggagtggaatggcatgggcttgcacagctggcagtgtggccagcttaggcagccccctagggctctcagaggtcagaggtggagagcgtggagcaggatggagcccaggtccccagctgcagccatgcccggccaccgtaccacccctggtatttttgtcatagcatgctttttaaaaatgtcctagtaggtttaggcattttgactctcagctacctcccccagccctaccaccccacttcccaagcccagctggggtccccggcccaccccagcacttggccctgatttgggtgttttatcccccatagaaaagagcaaggatcgcggcagcaacacgatcggcgcccgcctgaaccgagtagaagacaaggtaggctcacgcgccggcctgcggtggttctggttagcgtcctggggccagcaggcacctccctgtggtctgcgtgtgaacgtgaagctcctgcaggcctccccaccttcccgccagtgcctactgcagcctgcccagcaactcccaagaggggcccaggcccactgcccacctggcggggcattggtcccccatggaaggagccaggccaggctggtttctcatcctctgacaagtggcgtctttactggcaggtggcaccaagtgccccctccccccagctctttcccgctgcctctcgtagtctgctttgtgctctgcgagcctcctggctgtgtcctgagtggagggtggcagaagctggcctcacatcccagccttctcctgggcccagctgtctggggcctccacttggggccggccgagggctcagggaggtgcagggcccagctgggatgggttcatgggaagagaggcatcttctgttcaccccgaacccaccaggcccccactccccaccaggctctgtgcccatcactcggtccctcaggccggagcctctcccccaggcaccctgggagctgccgggggatctgggcggtgggagggcctttctcgggcccatggctgagcccaccactgccctttgaagtctctgtggtttgaagcgggctgttatcttgccgaacagcaagtccgtctacatggactttatctgaaagtagctgagaggctaaaaatagaggagtttcagttgggcagggagtgcgtctgccgcccggtttccctggcaacgcctggctctggcctgcttccatctcggctgcagccgggcaggcggggcaggcacagcccggcccaggctcctgctcctgccccacccgtcctggcccccaggacctgcagcgtcaccctctccccacctggcaccatctgcccatggcctggggcggccgtggggccctgagaccagcaaattgggtcatgcagaaagagcgaaggctggtgttcaggtgcctggccccatggggctgtgtgaccacagtaccctgagtcccatgggcctggccaccctctgtcagcacagacctgagcagggctggtgcagacctttgccaggcagatggcccagtgggagatagcgcccatctggcaggacaggaagcaagacccgggagaggtcagctcacaggattggcaagctcagaggcccagaagccttggcctctctgctgcccggggaacacggtgtttccctggctttctctttgcgcaagggctgggtgactcctggctggcacacccagtacagcagggccgggtaccctgtgttgttggcatggccaggagtttctagacatcaaggaaagccgtggtagagacagggagtggcacccagttccccagcctccactcctgcttccatctcggctgcagccaggcaggcggggcgtgaacatccctgacgtgcaggagtgtcggtggccctttctggacagcacaggctggggacagcccccgcctttccccgccactccctgccaagctctggttccattgcctacactactgtcccagacctttcttacggctctgcccctgctccatgggacaggccaccctctaagcccagacctggagtctggcatcctgcgggggtgatggtgggtggcagacagggcctcctgaagtgcaatggccccttcctgacgtgcacagcagccgtccagcagcctgctggggcctgggaacaaggacacagtcctcagtcagccaaggtcggtgtgggggcctgcagaggggccagcgctggccttgaaggcacaaaattatgcacccaatttcttcacatctgagcaacaaagggaagcattttccggagtccctgatccctagggcaaggtttaagaacaaggctggggccacatcctggtgccctgtcaggctctgagccggggccacgaggattctggtagattctgcatgcacagccctggtgggccctggctccctgccattacattcgagtcctctgcctggggtctctgaggtggtgagtggcacccacagtcgacactaaatctcagccccgctgaggggtctacctggaacctggctgcccatcaaggagttgacagagctgtgctgacctaggtgggtaggtggtagcctacccggtccttgccctgccactgactggtgcacccctcagggacagaccctaggaaagggcctggctgggcctggagggcttggtggcacagcctggctcgagttttctccgttatcagtgcagccatcgggaccgtaaataccccaagcgcaatcctgctgacttcgggaagtaggggcaggaaatccagcagccgcccggccctcggaggcccagcaggcgtgcagcggtgccaatgcccgccggccctgccaaccccagccagagcccctggccttccctaccagcaccctcccccacctcatcccgctggtctggctgcctgccggaagggagtcaaggccccagcctccaactgttttctcagctcagctcagcccctcagctgggctgtgcagtgagtcccaccccaggccagcttgcctagccataggatgagaggtctccgggatgcacagctggctggcacccctccagggaggcctagagtgtccccctgcagggagttcaccagtgcaggccagctgagcttgttcagggctgcctcagtttccctggcagggagccctcttcttccttggtgtcctggccagggacccacattggagagaggggtctgggggtctcccttctcgtcacagtcctgcgggctcgtcaaaactcttgcttgacagtgcagtgtctgctccaacacagacctcccaactaccttgcaggacgtccccattccagggatcccttccacccctgtgcctgtcctggtggcttaggttctgcctcactccagggtgtggagagcagaaacccacccacacccgcagatccaggggcctcctcacagcgagtctacttcctgcgggcctccctcccctgtcaaatgagagggtttgactcctgcttgtgtccttagggtcaaaagtcacaaaagctgcctcatgccctttctgttttcatcttagattattgtcttctttatcctggagaggactcttatttgctcaaatgcccacataaatcctcttttacagatggggaaaccgaggctcagagaggctgagtggtcgcctgaggtcacacagctagttaggtgaagagctggtcccaaggaggacacagacaggggtgggagatgaggtagagagagcaaggaggggtttcatatcacccaaagtccgtatggagaggctgaggagggttgaggccaggggcaggctgggggcaccagcagcagggcccagggccttcagtgtgggccagggaccaatgcaggcggtcgggagaggtccggagagagctggccctgcccactccccctctggccccactgggcttcctgaagtcccacacagggctggcagtctgtgtgggggctgcataccccagacattctgaggaatcgatggcagaggccgctccagccctcctcccccagcaagtattcttagcttggtctccaggacctgccacactgtttacgttgggccctgtttattttgcaagctaagctcatactgcttttgctgatatgaggagcacagtgggctgggagagtttctttcttctctgtttttgccggaaatgttcatggctgagagccggacacaggggagtcctgggtttccatgccgcagttcagaaagcgttgggcgggaaggggcccccaccacctgacactcctttcactgcctccggtcgcagaatccaggcctccaggatgagaatgccccccaacccaggactcccaaaaccacaccctgcccatgcctttaccaagcttcgtgcatgaccccaacctccaggatgcaggcaggcccagcctcccagaattgggtgtttgcccccagacactgctaccctttccctcattccagtgtgactcctccatcaaccaggccacaagctggaccccaaggcttttttgtcttgggcagttccccgagctgcacccccagagccgccgtgctgctgttcatcctctccctttagcccaacccctgctgagttcaggcctttatcatctcttacttggattatttttccagccatatatgcggtctccggcctctcctcacacccaccaatccttcacattgtatattatttcttaaacactgctgaaatctcacttactaatatttaatatatcagaatttttgtgccagtatttatgtgtgagatacatacatgacataattttcctgtcttgtatggtcttcatcaggctttggtgtcaaatgtatgtgagcctcacagactaacttaagaagtgttccctcttttcctatattgggatattttgtataagattagaattttattttcctcaaatgtttggtggaatttaaaggtaaagacatctaggcctggtgttttctttgtgggaagattcatcattcctgattcaatcgctctaataattatggactgttcaggttttctatttcttcttgtatcagttttgataagttatatattctaggaatttatacatttcattttagtttccatgttcattggcatttattataattttaatgtccgtccattagcatttagtcccattttttattctcaatattatttatttgtgccttcactgttttcccccttagtggtcaaacttgacactattcccctgtcttattaaatgtttcgtggacttctggctttgctgatcctctctattgtgattttgttttgtttcattcacttctgtttattttattccttctatttacttggccttaatatactgttctttctctaacctctctaaattaagaagaggataattcttaattttcaggcttcctaaatttccttttcgttttaatttttctaaccactgtcaatctcatggctttctaaatttttaaggtatgcatttaaggttataaatttttcctttaaatatcatccaaactacatctcccacattttgatatatggcatttaattttaatcttcattcactttagtatttttctaatctccattatgatctcttgtttatcctaggagttctgtagcaatgtggtttttgtcattgttataattgtagcacagctttctcataatgttgccctcttgtcagagaaagcaatccatatgatattaatcctttagaatgttttgaaatatgatttacggcaaaaatgtggtcaatttttgtaaatgtgccttctgtacttgaaaacaaggtatattctgacattgttgggtgcagtgttatgttcatatccactggaacaagcttgttagttggtctgttcaaatcttctatattctcattggaatgtttttatctgcttgatctattattactgagaaggcatagggcaaatttctgtttaactttctaagaaacttctaaactgtttccaaaggatttataccattttgctttctcaccagtaaagtataaaggttccactttctccacagccttgcaaatacatggtcttttctattttagcccttttagtgagtatgtaatggtatctcattgtggttttgatttgcatttccctaatgactaatgatgttgagccacttttcatgtgcttattagccattcatagtcttctttggtgaaatgtttattcaactctcttgcccattttctaattaagtagtctgttctattattgagttgcaagggttttttatatgttctggatacaagtcctttatcagatctatgacttgcaaatattttctcccattctgtggctgtcttttcatttccttaatcacatcttttaaatcacaaaagtttttaattttaatgaagtccaatttgtcttttcttatatggctcaggcttttgatgttttatctaagaactctgcctaatccaaagccataaacattttctcctgttttgttttgggtttttttccttctagaagttgtatagaattagctcttacatttcggtctatatttactttgaggtaattttggggtatgatatgaagtaaagtctagatttgttttgttttattcttacttatggatatccaattgccccagaacatttgttgaaaataccccatttcctcctttgaattatcatggcttcttggtcaaaaatcaattgaccataaatttataggtttatttctggattttcaattctattatgttggtctatatgcctttctgtaagtctatatgcctttctgtaaacccatactatactgtcttgattattgtaggtttacagtaagttttaaaattaaattatgtaagttttctaattttgttcatctttttacaaattgtttctgtctattctaagtcctatgaatttccatataaattttaggttcaacctgtcaattaaaaaagaagggcctgctgggattttgataggcattgtgttgaatctatagatccatttggggaaaattgacaacttaacaaaattgagtattgtaatcaatgaacatggtatatccctccatttatttgatctactttaatttctttcagtgatattttgcagtttggggcatataaatttggtacttcttttgttacatttactcctaaatattttatttgtcatgctagtgttaatggaattgttttcttaatttcattttgaattaattgttcattactagtatatagaagtaacattaaatttttatatcaatcttgtaaactgacttttctattcttggctttagccatttttgttgttgctattgatttcttaagattttctacatataggatcatgtcttgtggcaataaagacaatttttacttctttccagtcagatgcctttaatttctttgttttgcctaattgcactggcttgaacttcaaaaaaaatattgactagaagtgctagagcagatcttctggggaaaatcattcaatcaatttccattagctctgagttttccatagatgccttttatcatgttgagaatatttccttctatttttagtgtgttgagagctctcattatgaatggatattggattttgtcaaatgctctttctgtgtctagtgagatggtcctgtggtttttattccttattctactgatttggtataatacattaattttcaggtgttaaaccaatctcacatttctggaatatatcctacctgggcatgatatataatcctttttatatgatgctggatttggtttgctaatattttgttaagaatgtttgtgtcttcaacctaggaaagctgattgaaagaaaaaaaaaagaatgtactttatattcataaaggatactggtgtggttttcttttctgactttgatgtcagatttttaaatccttttctttttaatcctacaaccgtaggatttcaggtttgtcttttgtaaacactgtattactgagtttttaaaaaatcatttaatacatttatatttaatacatttatatttaatataatttctaatagatttggattgaattctagcagtgtattttgtgctttccacttgtactaaatctgtaatatttatttttctcctctttcttgcctctcattagattattacttctcattctacttttctctctactggttttgaagttatgtattctactaccatccttggaaaggttaacctagaacattttaaatgaatatatatcagaagtaattgctatatctacccatatctgtaataaaatagggatcctagaacactttaacttcaattattctccccctgacttagtactttgctgttgtatattttagttgaactgtgtttaatttttaactcactaattggtagtgttttatacaatcaatatttgtttaaatttactcacccatttgcctctttgtcatttgttatttcttttttatctcagatcttacatctgggattacctttttatgtgactgagggattcatttaaattttcttcagtgaaaaactctcagattttgtccgcaaatgaccattttactgtcatgttaaaaaatatttccaccaattataaaattataggccttaggttatcaaaattcttttttcttagcacattaaaaatgttattgaactatcctttggcttccactgttaccgttgagaatgaagatgatgaattgttgctccttggaagacaatctgtcttttttctctggctgcctttaagatctttcctttgactctagtctgcattttcactaggatatgttaataggtttctttttttctgcctgagctaccttactcagtggtttggtgtctttcatcagttctagattattctcagttaatacttcgtaagatttcacttcagtctcattatctccttctgaaatttttattggccagtagtagaccacctcactccccttcatatctcttaaccttttttttttttaaatcactttgtctctctgtactgtattctggaatccatcttccagttcactagttgtttctttgactgtgtttaatctgctgttaaaactgttcagtgaattttaaacttcaattattattattttatttataaaagttctgttgggttcttattcatatctgataagtcattttaatcgtatcttcctctttacttgcctgttcaaactttaaaattttcttgaagtgtattaaatatggctattctatattgagcttctcttaattccagtatctaaagtatttctgagttcacctccctgtttgattttttcttctgctgactctcattcatggtgtttcatttcgtttctgttttttttttttttttcattgtaaacttatatatcttaaaatttatctgtgggaatttttgaagtctggtgtgaagttggggtcctcagggaggaatcatgtttaccccttccattgccacatatgtgggtgtactgccagcctggacttttaattctaggctcaaagttttctaggccacttaggtagtatgaattcaagcctccaagctgagcatggactaacttgtgaacatgactttccaggacagaacttgttctccttctcttagcagtaatgcagttttctttacaatcttctcagggagtaggagatttttcattggccctcacaatgaaagcagagccctttgagggtcccagctttgtgtaagtctctgctatgagacttcctggggcaggcctgggctttgacacataatcatctattcctggtgaaaccaaagctcaagttcatctcactcatcaaataccttcagggcccctattacctctggggttccactttcactgagttttcagcctctaacctcccttacttcctggtcagctcatccatgctagccacagatatcattttaaattttctaatagccacttttttaatttaaaagaaataagtaaaattgattacaataatatattttatttaacccaatagatccaaaatatcatttcaatatataattaatatttttaaaactcttaaaattgttgacattcttctttttcatactgggtcttcaaaagccactgcatattttacacatttcaatttagacaccgagttttcatgagaacgacttggtctgtatttagatttcataaaatttaccattgaaaaaggagattcccatgcctaagtcatttcaaacatactgaagggttttctaataaccgaatgaaggatctatctttaaattttaattttaatttattaaaatgaaaattccattcctggatctcagtcaccacttttttaagtgctgtgccacacagattcagctatgggacagcgctgctttggacgggcatggccgtgcgcgcgtgtggggaggtgagtgtggctcccccaacgtttacccaggccagccccaaggaaatgctcagtgagtgcccatagaatgtggtgaatgtggatggcagggaccatacgggagagcacactccagtagttgccatctcatggccccagcgcccctctccaccccatgcccccaacagagatgcatccctgcagacccctcctgggctccttctccacagcatcctccccaagttcccctgcctcgagtccccagagctcatgacccacgcctccccgaggtccctaaggaatgtccgcttgggattctggttcttttccggttctctgcagccaggtctgttccctggcgtagcttcgcaactggaaggtgctgctcagcagactgtgagaagtgtgtgtcggtgcaggcaggacacacttccaggctgtcccagaggccagggagcaccttgccactgaagggctggttgcatcagaaagttaggcagcctggactgccctggcagccccagacctgcctctcctcggcagctccccctcccctctgcaccaccccccgccccccacacccaacccaacactcctctctctgctgctgggctgctcttgagtgacagggccgtaaataggcaaaggcgggggctctgactgatcaaagggctccctttagaagccgtcattagtttgctattctgggaactggttattttaaggttagtgtattttttctttcctgaggagccgtcttagtggatggcggagtccggaggggctgcccttcagtcaaaccacacaagccctgttttgtctggggttccaaagataaacctataatgaaagcagcgtttgacgctgagcaccgccaccctgttcctgcacaggggtgggtgtgtctgccagggagtccctgtgcccagcaagctccggggaggcttgcaggaggcccctggggccaggttgagtctgctcccagggagcctgaggtgggaggtcttcagacctggcattctcacagccatcatggcttgcctggccagggaccgaggccccgtaccctcccccaacttcaggctacccccaaaggccacccctggaaccaggctcagcaggcacctctgaaccgcagcccagctctgcccagcaccttctttggaaagacagtggacccaccagtggccaggggaatgcacacccctaaagtcaaaatgtaaggaaatgatgataccctgtgctggcatgggtgcggaagagcagacgctcttctgtcttactaggaggtgggaattaatgaaagtaacaactcctggaagggactctagcactgcctgtgaaaactagaaacccgtcatcactcctaggaaagaaaagcaccagggtcgggctttgcatgcaagctttgtcatgtgacaagctcaaagccatctgtttgtccatagagaagcgtggtatatactgagacacctcgacgccgcagccccagtgcccgccacagacgagcttttgccggcagtcattgctcgggagggatattattgatgtgttgctcagtaagaaaccaaagttgccaaggaacgtgatcgcatctctgtgcagccacagcacccaggacgcagctgggaagggaggccaggggacagctgcgctccgggatgctggggccgtcggcctcccccttcccaggcccagctcctgggcactgggaccaccgtgggcttggctctgagatccaccatgagttctcgctttgtccaagattgagatgcgccaggtagttggtgtgctcatttcgaggtgtttctttttccccccagtaaagtgatgtcacgtggaggtgagtgtgatgggaaagggaacctcagaaacaaggtcccaccttggtcctctggtctcccctgggaggaccacccccaatcctaacatcctgtgaggtcctccccactcagaggctcctctctgtgccacccatcctcggataggttgccatgaggttgccagaggctggcaaagggcacttgtcagctgcagattccagccctgccctgggacttggaggggatcatatccctttgaccaccaggtcatgacccccagatcatatcccaatgaccctctgccataccatgagcccaaatgaccctcaacctgccacagagacagcccccactaactgccactgggtgatgggaccgtggagagtgcccagctcagaggagaagcctgtctgatgtggctcccgtcctcctctgctggggttgtctacactgtccccactcggtgacaccaggagctggcattgcctctggttctactgctctggacagccctggcagcagtgccctagcctggcccagcacctactgagacagccgggccaagccccatcctgcaggtgcagtctcactttgtcactcttggttacccatgggaccctgaaccccataggaggggctcatcactcagggtcctcatccaggtgtggcccatccacacccagcatccagctgtgcacacagggccacacacagacccctttcccatccccccttcccatcccacacagggcaaaagcctgacctcctctcacgcctttggagccagtggctggggtgcaagctctgccccctacacgcgatggctgtgagactcggcgagtcacgtgggctctcagcgcctcagcctcctggcccccagtggaggggacaggcaccattatgccgatcgctcgcgtgcaaaggccctgtggcgtgggcagtgtcacaagctcctggcccaggaggcctgcttggctgatggcagagctcagagggtgtgagcatgaggatggcatcaggggtctctctgcaagttcaagttccgcctcaaccctactacgtggccctggccaggcctcctgaatccaggtcttgctttccccagctatccagcggcttcctgcttctcttaccctcagcaatcccccaagaactgttcttttccccacactagcgtctctctttcttggggtgtttctctcttagcctgcctgtgggggacagttgccaccctcaagcctctcctgaatgactctatttataggcctccaatattggccagagaggaaatttaagtctttttaaaaattcagctcaagtgtgtgtcaacttctgtgagtgcaactgcttcagagagaggctgggataggacagcaggcggcaggggcgtgtcaggtgcccgagcaggacggtggccggagcccgcagcggccgagccctcactgggcaccgtgtgcggatctataatcgacagcatcaattgcgggagtccggctgggctggccgcctgcaggggccagggcgtgagggcggtgcggagccttgtctgtgcggcaaaccctgcctggctgccctggccaacctcagaaaaacatgtattttggtcaaaatgggccccttttcaaacttgtcaccccgtgggtcagggcacagcctgcccccagccggttctgcatattaagcagtggcttggtcaccatcaaaaatagatgtcccgacccgagcctcccctccctcccggggaggggacctggccgtgccggctgggctgggaaaccgcgggcggggaaggaaggacggggcgaaccggcggcacaggcccagcacgtcccgggccctccccgtcaggtgtggaccccgaggttgtgcgggggcttggcggcagctgcgggtgggggtggggggcccgggcctcccgggctcgggttctggccccaggtcagaggtggcgctggcggcaggtggatgcccaggtcctcgccgcgccgctccgggcggtgggaccggcttcctgccctggctccgagcccgcaggtgggggcttccgcctcactttggacggtggcgtccacaaaatggctgacgcggcgcacggccgtccctgcacggagccggtgtttactttgccgcgcgaacagcctttcgttgcccgggttccgagtgctccagaggcagatggaaatttttgtggattaaacacggggccgaggcgcgctgggctgtttgggttggcaacctgagccctccccaccccgttccgcgtccgctgcttcccgccctggtccggcgcttccattcatgccttcccgggtccctccgccacccctgcaggcccggcgtcccctcccgcactcccgcggcctccagggggtggccctgcaggcccagagcagcgtgggcctgaacccctctccacgtgtggaagacgctgcagcaataggaaggggctgctcctttgagggcccttctcaaacctggagcccctctggccgccagatctttgtctgtgaaacagcagccagtgtgtggaccaggcaggagtggatggggtgtgtgcccacaagtccagcacccagaaaacccccagcacacggtcccttttacagtggcctctgctctcaggaaggtggaaagcgccaggtggataggagggacggggccgtgacccctccctctgcccaagagaaactctctccctcaggtcagacccaggcctttcaagaagaggttgcagggtgtgcgggctgccaggaaaaggtctgtgcgggtgagggagcgcatcctatggatatctagaggaagagcgttctgggcggagggcacagcggttgtggggtgcgggctgaggcagtgcctggaccaccttggcaacagcaggaggcactggccagagccacggacaagggggagcctgggggcgcagaccaccctgtgaggcctcaattagaggagatgggggcttggggccccggagggctgagatccagctcatggctttggcagcattgttcttgcacgttcaggattagccgagtaaggtgagcctgacagcggggccagcacgcagccccctgcccctcgccccctccctgcccccagtcccccacataggtgtcaaagtgcacagcaccccctctcttccccgccccccgggagccgcaggtcaggcacacaagagccatctgtgtgggcggcaaggtggctgcctgtctgctgcccgcaaagggatgcttgtccagcagggtgaacaccccgtcagggcaggagctgctgaggagatgctgatgcctgggtgactcatgctacctggccacccatcctcgctgggctacaaatgggttcagcctcatgggcatcaggcagggcccgcctgggtgcacccgacaaacacaagggctcttgttctaaggctctgtgatagcccctcttactgagagggaccatatccaataacgggtggaaattgcactagcagggtcatgtgagggctccgagctttctccagaacccaggaatatcctcaaaactgaggctgggcacagtggctcacacctgtaatcccagctctttaggaggccaagacggggggatggcttgaggccaggagttcacgaccaccctgggcaacatagcgagaccctgtctctatgaaaataaaaataaaaaattagccaagcgtgatggtgtgtgcctgtggtcccggctgctcagcaggctgagttagaagaatcgcttgagcccaggagttcaaggctgcagtgagccatgatcacaccactgcactctagcctgggcaacacagtgagatcctatctctaaaaataaaagtaagaagtattttttttttaactgaggcccttctggagggatggagggaccagaagtcacaaggagcagaaaggaaaaaagcaaaggaatccttctgaagcactgtgggcatttattcattcaccttgtgccactgcctggggctgcagtgtgagtagggtgggctggcccctgctccttagaatgtacagccccatggctgggcagggggacgcacatagtgacccgtaattacatatctgtctgtgtgaaggagaaagtactcggttttcccagtcagtggagtcaggagcccagagccaaccaggagtgagtgaggaggaggagggtgacacagggtggaagagtgtccagtgtgtgcagccttgcaaaggccctagggcacgagggcacatcctcctgaggccatgagagcaggtgaggcagagctggtgagcgagggatggcccggccgggccaaggatccaggggtggctccggcttcgtgggaggagggttacaggcaggtgaggatgcagttccaggagtggtgaggggctgctgtgggatgagggagagcatcagcactttggactagggtggaggccttggggccagcccccagtctgccagccccaccgatgagaacaagcagactgaggggagaaaggttggagaaggaccccgagcttctgctgtgagcccccacgtggggatgctttgctcggaggggtgctgaggtaggagggtcaggagggtctggagctgtatttggacttggcaggcaaccaaaaccccagtgcttagagatcaagtggaaaagaaaagaggaagaagatgggggagtgagagagatgggaaggcagtgagggaagccttggggaggccgtggtcaggggcggcacaggggagaagcaggctcatgtgactcagccctgagcccagccgggcccccaaagatgctggaccttaaagacacaaagatgtgatgcatgtgtgttcacagattagcggggagcagatgccgcatggaggggcgtcagggagtacaccgccttcccaggtgagggtgtcctggaggaggcacaagttctgctgggctggactggacccagcaagagagcctgagcctggaggacccctctggcccccatctcccactttcagcttcagctctgaagccaccacccagaaccacatacctgttcttcccaagtttgctctccctagcggagggaaagacgggaggtccacagattaccttgtctcttgaaagcaagatgccaccagtggggaccaatgtacagagaccaggcccagcctagagtgggtatagctcatcacacccccagaagctgtgcggggaggaaggcaagcaggcagcacagtcaagacctgagtttgatgactcagagggtcctctgcctgtggttggcgggggtccaaggggtcttcccatctaactcgccacctcctcccacgtcccactcagctccaccccacagcagccaagaagccagggcatcacttgaccttccgctgcgtcagtctccgcatctcgcctcccctacccccgacctctcgggtgctgtagggatgaggtaggagtggtggctatgaactggaggccttcgcctcgggctggagctcagagcagtccctgctgctgccagacctgcagttggggcactgcacccatgtctggggaggccacggacagggccccagggtctcaggtgacctgtcttgtgtatcccacttcgtttctctctttccctaaaggtgaagttctggagcaaaaagagcctgagctgtgagccgaggggctcctcctcctccaaactgacacccagtcacagagcaattgctaaagacacagtcatgcttgggcccagagtgggccccacggagcttcccccaacccagcctggcttgagcaggcccctgatctaaaccaccctaccccacacccactggggctcacctggggtttggccagcatccctagaaatcagaagcccgcccctaattctgccagcttctggctttccgttgccatggtgacacccagcccccagctacagatcccgccaactcttccctgccattttgcaagaaacaatatttttctgctccacaaacttggcgggaccctgcctttccccgggtccatgaggaaccccacgggttccttgccctggagtctctccagctctcatcccctgagtgcctccacaagcaggggtcccatggggcgggggccgggggaacagggggtaagtgtggccaaccccttgcacagggcttggagatggaggcccctccccaggtgagaccggcctttggccccctgccccactcacacagggacaccctttgtgtttttccacatctgagagccaccgacatttcttagatgacgttttcttgaacccaccgtgcttggtgcccgttaagtacttctactgcagcagcctagaaccgacacgtgtgaaaccattggcttatggcgcaatgcacttcctcccggcatgcatgaaaacataaatgtaaataccaaaatacacagggactattcggacaccacctgaaatcattccatgtcccaccagaagccagcacggcccctggccccctgccaggtgacgctgccccatggcagccacagtgctgatgaagctctgtttgagatcaccgcctggctaaggccaaggcggccacgtcagttctcacggctcctcccaaactgaggagcatggaggaccctgggcattgatggcagggtggcaggaagcacccatcgctttcctctcccggatcttcccagcacccttccaccttcagcctttataccccgagaccaggcgaggcctcccactgccgacccaggcctatcatggggcctgagaagtagtcctcatttcctcactctcacaccccgacacaccctctccatggggaaggaaaacgtgccccgaaggggcctgtgtccaggttcctgcccactcagcccctcggggccgtgtctccctgcgtcagagctgggcctgaagataatgggcccactgaggtgcaggcggtggacagacccaggaagacctcgtgggtttcccaggaagacagagactgggagccattcttcccggcggcagcggctctcggcctgtccttgtccccacacaagcccccactgctgcgccgtccctcctgcgccacctgacagatgtggcggtgagaaaacgatggggcagggaaacgttcgccattcggtgccaataaaggccgcctttatcccgaccgtaaatggtttctgtgtggagtgagactgtgcctgtcccgggcctaaccccccaagggccagagaggcgaaattagatccgtggggagagattttacaacgtatgggctggtggcaagtggcggcaaaccgtccccacggggccacaacggggcattgttcacggcctcacctgggctgtctccagcaccccaggatttacgaggactcggcccagagcctcgatgccggccgctccgggcagacctgggggggtggcgggggggaggccctgtgaagaggaggacagtgctgggggctgggccacggagaggccgggcagcgctggccccagcccccagctcccagctccccagagacagccagccaggaacgggccccaacctgcctgcagaccaagcggtcacatcgcgaatgagtcctcatgctgtgcgtcccccactgggcagccagaggtgtgcctgacggggccaggaggctgaagacaacctttccttgggctctcagcgatgccagctccagctgctgtgtcatcaaggtcgggctgggctggcctcttcctagcagaccttccaaaaccccgcagactcccgtggctgtaccagccctgcacctcctggccacctgcccctgcgtacccaccacccttgctccggagctcgagggccctttccccactagcatctgaccgccttcttgtatgtcttgaaggttctttgccttctctgtgcagcagggccctttacagtgtagtctggcccctcctcctcccccgggccccgtacttcctccattctgccccttctcaggtgtgcgggacctttttacagccccctgcttgtgcctgcactccctcccctgggagcctgcctcaccctgaccacatggccttcggcacccagcttgagtgtcccatcctgtgaagccagccggttcccccaggcacaggggatacctcttccctttgggcacctgccctgcgtactgtgccagcctccaggttggcccaggcagcccaggctgctcagggtcatggccaacccagggcaccgcggtgggcagatgcagcccctttccaggccaagttcagccctctcaccctcacaggggacccaattgcacagccatccacagcggccttgggacaatactgagtcttgagttaggggtgtctctcctcaaccctgagagcagccccttttcccaccctcagtgcccccacttgtggcccaggcccaagcaagcctgcatggtgcaaacccacatggcagcccagggcccaggaatggctgtccaagaggaaggggctggaccgtccacgccctgggttcccaaccacccttcccctcctggtcacctttcggcttggcatcaggagggcttgaagaagactcctcagccccacctgcagacctagctagttgccaaccacctggggttgtgcccagtcctcagaactcacctgcccatggtcatctgagccgttcccacaaaagccttccttgggatcctcagccgtctggggggcctccttactggggtcacctcaaaaacagctgtagaggggtttgcggcagcagcagcagacgtttttaaactaattcattggtgatggcaaaattatgccgagttccctgaaaaaaaaaaaaaatacccactctatttcctcattaacataattgcaaacagaacgaattttcttgatttcgtgtaaacaacagcttgaaatagtttataatccttgcaggtatcaaattaagttcttacttatggtctggaaattaattacccttgcagcgagacaaatgtgaaaactgtgtatttttgacaagaaaatgaagcagctattggggaaaatgtaacttaatcgtagcagagaaaattgtttataaattggtcgcgttgtttgaactctcgcctctgtggctcagggctgggttgatctatgcatgtacatttgcctaatttgggacaggggaaggggctggaggagcaggaacaggacgggggaaggagaggaagaagaggaaggagagcagagggtacccgcgtgaagggtacccacgaggaaggggacattagacaagaatgcaggtggtcaggcggcacttacctggcaggtgaaatctaaacaggcaccttcaaaggaggacaaagcagctcccttgggtaactaggaagaggacaccagctggcgaggggcaaagcaaaggacctgggacaggcacgtgcctggaacagaaagggagccagtgtgtctgcatcaaagtgagtgagagagcagcgcaggagagaaactctcagaggcaggcaggggccggaccacgggggcggtggtgctcagattccatgtggctgtccatccatggtgggccaggaggtcactgttgtggtgacaaccagcgctctttggaatggactgaagtggaatgtgatgtttaacttctgtagctgtaagttcgagtgtgtgtgtgtgtgtgtgtgtgtgtggtgtggtgtgtagcatgcttgcatgcctggacacagtgtgtgttggcatgtgtggtgtggtgtgtttgtatgtgagggcagtgtgtgtgttttgttgtatgtggtgtgtcttctacgtgtgagtgtggtgtgtgttgtgtctgcatgtatcgtgtgtgtggtgtttgtgtgtgtgagtgtggtgtgtatatgttgtatccaagacagccaaagggaagttccaaggggctcgtgcactcggtgtccagggagcagcatctgtgctgtctgcaggtagtcaccgttctccatcctgttacagcaaataccctcctctgcatttttcccttgtgtttgatttgccaggagcagaatttctgggttggaatcgggaacatttagaggagcttctcagtagagttgtacagagtggaaatgagtcggcaggctgcatggggggttccagtcacagcacagagggtgtgtgttttcggtgcctgccctcctgagctccaagtgtcccacgcctgcccgtcagtcctcatgtctacctgggcgaccccattttgaagatgcagaactgaggtccggagaggcctgggtagctgcctaagggtggggtagaagcatggtgccggctcagccaccctcaggtctccaggctcccagccaagggctccgataaggctgctgggacctgggggctgtgagcagatgcagacgtccacagttcccagggctctgaccctgccctgtctccagagcccacagccccacccaaaaggccaggaggtcacagatctgggatcctttcccgccaccttcaagaagggaataaagccacttcctgctccatcccagtggcctgagggtgtgggagggacagaggcctcccccagcagggtaaccctgcaaagagggggctgacagccgttcctgcttcctactgggcagaggctatagaggaggtttccagcgcctcagtgcaggcagctgagcccagacccctgggctgtccttggaaccactcccagcccctgccagctttgtagcctctttcttccccaccccacttgcctcacctcggcccaaacctgggtactcccagctgcagccctccccactttgcctgctctgaggctgtgtagggcccagggagtgggggaaggggcctgggtcccgcacaggattgaggtggcgtttacagaaccgggggccagagcagctgtggccgtgaaggttccaagcttgaagtggaaagggttttgatgccaaggtccaacgcccagcttatcattgtgtaaatctgggcaccacacatagcctctctgtgactcagtttcttcaaccctaaaatggggacatgcttgcgggggttcaggagatccccattgagcacggagaagagcaggtgctgtccactcagtgaccatctgccgtcaccattccccaagttatgggagaattcagctatggtaagagcagagaacaggatggcgctggggcaggaggagaaggtgtggctggcaggcactcatgaggacagggtctcagagcccattctagagaatgttccagaaggcatggggaggcaggagaccaggtgtgcccagggtggggacactggtaatgggaggtgccagagctggtgacagaagcaatggaggtgggtgcagggctggggcagggccaggcagtggctcctggggtgctggtggcccagacagactagagatggtggaagggtagagtgcagtcaggtttggagtgggtccactctttgcacagaccagccccctagaggctccccagttccaacaggatactgggctccatggctgtcacgtggagctgtctgtaggtggactggcttctgacccactcggggtgccggaccctgccctgtgcctgtaggggcgggcactcacctgcccttgcagtcccctctagctctccagcttcctgctggccagtcgtatcagctggctcagcagcaaaggcttcagaccaggggacttaggtgagagaaatttattcctcacagttctggaggctggaagtccgagagcaaggttgtggaagggtcggctcctggtgagggccctcttcctggctcataggctgggcccttcctctgtgcttacacatccctggtgctgccgccttctcttgcaaagacgtgagtcctatgggaccaaggccctgccttcacagtctcctttaatatttatcacctcctaaaggcctcgtctccaaacacagtcacattggggattagggcttcaacatgtgaatttaggagggcacagttcagttcataacacaagtcctccgtcgggccactggagcctggggagatgcccccactgcatgctgaagggcaggaagtgagggaggggagagcttgttgcgggggtgtccttgcctctcagggccacgcccactgcctgcgccagggaagaccagcagtgacagggatggtgtccccgcagcccctgggttaacactgcctcctcccttgctcttcttggcagcacagacctcagaaggctggagccccgggcaggcccaagcacagaaaaagccagagcagggtctggggtctttgcctccagtagggtgttgggggagctttgtattctctgtggctggaggcgatttcgccagctgcggagcggggcgcggtgggcacattcacccagactcacaccggcccaggacgtgctgagggtgttggggcccatccaccctccactccgcttttccaggggtcaggcagggggaggccacagggtgcccagcttcagccacacccgccttctgacaatgcgaagcccacctggtctgtgagctgtcgcctctgtcctcacagtgacagagctggctttgagggcagcaggacaggggtttagccctggctccggccctgtcgccagccggcagcactggggccaccagcacagcctcccagccctcaccagtattaactgtcatcccaagggggccactgaggcagcggggagcctgccctggaatgtgccatcctcgggcgcaggcagcccttcatgggcctgcccaatgtctattaattaagccccctggagactccaggagctgggggccttggctcagtgccctctcataaagttctgctctctggggaccgtggctctggcagccaccctgcctctcaggagccagcctagtgcctcctgggtccccagggtatagggccagaccccaaggcttagtggcaagaggcccagcagatgctcattctcccggtcaaacccctagatgacactcactggggaacagaggggctgggtccaggaaggaggcgtttgcagggcggggttgtctcctgaagactgcgagctagaggggagaagccactgcatgctcccagcccttcacctcacagtcccggaatggggaagctgagtggccacccacccttggacgttccctgagcatttccccactcagagtccagaagcccccagccccagcagaccctacagcgctacctgcaaaggccagaccggccagccagggaggtgggctagacagtgccctggccaccacagggcaacccctcagctccacttcgccacccagaggagctggccctggccactctctcagagcaggaggtgacatgaagggaaggtggcaggatgggagtgcccatcagccggaaggccacgggagtcaatggtgaggggcagagtgagcaaggggctcagggtagcccagaaaacccagccgggcccccccccccacgggcacccaggaaccgccctggctttgctggaggacctgccatggctttgccagaagaccctgggactgtctggagcatcctcccaaggactcgcccctagtcaggaaaaaatagggccccggagtcagcaagggcttcctgggggcccaggtcagcctggacggtggcaggactcggcgaggtggggatggggcttggaggatgtggcagagttcccatggtgtgtgtagaatgatattccctccagaccacggtgccttctgggctctggagaatgcacctgtgttcccaggagctttaggggtacccaggtggtgtgatggggagcaggagccagttgttcccaaacctcgccctttctccctgcaggcactggcagagctgggggtgatggggcttcagtggagcccgccaggactggggacacaagcctaggcctgtaccgtctgcagccccatctccaggtcccggcctgccccagcctgcccacccccagcctgtcccccaaatgcccagggctgtggcctgcccagacttgccagggagctcctgtgcccttctttctcctggcctctcagaagcactccctgatcctctccccacttccctcctcccctctcatccccacctcgggcccaccagctcccaccctgctatgcccatggaccccagggtcagcttttatgcacactcaggtactcaggacaccccacaccagccattggatggggccgcctctgccacctgctccagccacctggcagatcccactcggctcacacagagccttggccagcatgtggccgcagccccaactgcagcggaaggtatcggggagtcgaaggcagaggggaaaggacgggatggcgggtgaaccacacggggaggagcctggagctccttctgcattttcttaggaagtgctgcagggacccactggattctctacagcgcccagtagcccattagaagatacagaggcagcaatattcacagggccagaaacaactgcagttcacccatgctgtgcaccagctcccacaccacccatgccacgtgcctgctctccaccgagccctgcaaatgcctcggcacatcagcaagcacaggcctcctgcaacgtcattttgcagaagggaaactgaggcacaaaatactccactgccaccaagtcacccaactcagtggtagagctgagatctgaatgcaggccgcctggtcaagcccatctgtgaactagaaccccgccgccctgggcagaaacaaggctgtattgacggtgctgggagagatgaggggagggagggatggaggccggaacagagccggctgctcccctcagagggctgggtgtcaccccagttttgtctgtgggtttgtggagagcatcactgaaatttctaacttgacagagtggttccagggctcatatagaagcataaagaggtgaaaatagctgatatttctaaaggcaaaagctaacgagtggggttgcactgcccagcgtgaagctgcagccaccattctccacactctcctggcccttggcacaggatgagccttgcagacggaggcgacaccaaggccttcccctgcgcccacacccagcgtctggagctgctggaaatatgtgtccccaccatgaaactgatgctgctgttcatcccattttgtgtatgaggagactgaggcacgggcccacagttgccagctgggatttgtcccaggccacctggctcaggtcaccggaacatgtgacaacacatgtggtcagggagaggcagcaccacagtcagatacaatgctgacagggacggcagagttccacaggcaatgaggcccccggggtaaaaatgaagcagtttgaaaacaaaaccaggaagagtgtctggccatcccgggcctgagtttctgcccatgggcagctgccggacaagccctctggtgtgtcagcgggtcaggctgagccagacgtggagatgaggctgagagccggaagcaagggctttgtctctagaagacgcaggggtggttcacaggccgctggggacccaggtcacagagcctttcccccagctccagcctggctggggagagcaaaggctgcagctgcacagggcccctccctgcctgcccaaagctgctaccagacagcaagctggggagaaaactgcagccgacgacggagagggacgacattttgcaagtgaaaactcaaatctatgagaaaagcactcgccccgcagtaggaaagcaggcaaagaactagaaagacaatttacaaaaggatctgaaggtcctcactgcactcatcctgtaaggtggacttggggcctcatctggccccgctgcctgtttttgtaaataaagttttaatagcacatagccacgcccaccggtggacacatcgtccctggctaaccttacaccaccttggcagagttgagtcgttgtaacagagatcgtgtgaccaacgaagccagaacgatttactctctggccctttagagaaaagcgtgctagcccttgctctaagagtttcagtgaagagacgcaagatgcagaaatgaacctaattgtgtggtcttccgtgctggggaagccgaggagaaatggaagtatgagccggttccctgctccagaaatcgctctgatgacacgtatcacggggattaaaaaacattcctccccccttgacctcataatcctccttccaggattctctccctaaagaacaaatcagagttatgcacaaacaagctaatcacagccttatttataatagtgagaaattggaaacagaccgcatgtgcagcatttgcgggatgttggttcttgttatgcacattagggacaattatgcagctttcagtcatccctcagtgacccaggaaaatgccccatgtacaaggttactggagacaaacatggtcccagtttctggggtgggaggtggtgcccaaaacatcaccttacagaaaatgcccggaaacgtgtctctggagggtggacttagagatatgtttttgaaacagattttttcatatttttcaaaatttctcccgtaagtggttcttacctccataacagaaaaagagtaaacaatcaatgtggagtgaggaagaagagaggggagggagagaggaagggagggaggtacgcagggaggcagcaaggggacttccctgctgaggacgctagcccctccgtaatttgtctgtccttcccagcctgcctggggccacatgggccactgtgcccagtgaagcctggcttccttgtctgtggtgccagccatgtgggagggtaggcgacccgccttgggctgtgtaacgcaggcttgcctcttccttaccccggttgtgccagtggctaggcaccaggtaacctgtctgtgctccccaccgagcagctgggccgtgtctgctttccgaggaggctgcaggtaacccttctctaacctgctcagcccccagctccatcttccacctgtcctgggggatccccattcattctctccgtgggcatcatcagaggctcagctgtaccagaccactgcccgggagtacgttcgggctcaggtttcccttgagggtggcccccacctgacccctccccgcccctctcttgtgccctgagagaatagcgtgcccccagagacagtaaaagcctggcttgcgtgctggctccggtgacacacaaaggcctctgcttctccactctcaggccagcccgagagggacggcaccaccgggacagcaccagcgggggcatggggaggggtgacaggttgggcggggtccctggggctggggcgtagcccctctctgcaggccccacagtctgtgaccgtgcagggagggtgctgggagtctcggctctttcggaaggcgccagtgtttccttgtcacagaatgaagtaaatgggacgatgaaggggcagtgtttaaatggctgctttagcccgtttggaagtctgctaattattctcttgaggaaagaaatgcaggttcattattataatgagctttgggcaaaatatttcatcgagcctgacaagccgcagcgacgcctcgaacgtggccggctctgaaaggcctcctattctgctggaagctaattggcccggggtcttcccagccctgtgctgtttgtgtgctattttaattcgcttatgaaaagcccccgctttgatgtccgggaccagataaggccgggaggggaccctccatggagagcgggactgtgccgcccgcggtcgctgcactgggcctcctcgcccccccactccgggcccggggccagcgcgatgtcatgaggtaactgaacaaacagtcctgctgaaaaatatgcttttgtttcactaataaatccctcctcggaacactcccgggccgggccctcctcgggcccagcctaccaggccttcccgcccagtgcctccgcaacccgcgccaggacagccggcggtgggcacaggcgggcgaggggcacccccaccccctccagggccccccttccctcagcctcctccccacccacccgagctgcctgcctttcccgcactctcctccctgacttcctcccacctaccggcctcttccgacctctctctgcctctttcccccatcacgatactccagtggccaccttccctgcccaccatgcctcctggcccccaatccggtcaccaacttgaggctgcccctgacaagccctggctgcagcatgagggaagcagcggtagagaaggccaagtttgggcaccttgcacagcctcctggagcctcggtttccacatctgtaaggatgagacaggaacggtctctctgggggcagggccggtggtacctggagccctccccactgagcacctggcccagtgcccggcacgtggcaagtgaaggcggctgcttcccgcccctctcatggacaccactgtgggcaccacttgggcaccctgtgggcttattttccctgcccactgccaagcaccagaccaagatctgatgccatctgcccagggcattgagggtgaacccatccaggctggcccgccttccagccctcccccagcacccaccaagcccctgcgatatcccagtggaagataatggaggtgttacggggatgggctagaactcggtcctggcatcacagagctaccccggtcaaaaatataccatgtaattacagaccaggaaaattactgtgcaggagcaaagcagggcactgtgccggagaggaacaggggtggtcagggaagacctccgagggaggggcatttgaaaatagcattcagagttgctattaataggctctgatgcagaactgagcagagaagaaaacaaaagaggaccataatatctccacagagaactatcattaattttttaaatgggagtcctcaggtaggttggttgattgagtgattgattgattgataatcttggttctatttgaatttctagaaaattccaacagtacagaaaggtctgaaatgaaaggtaaataccttcatgaccatgccccctttccctaggataccccttgttatcctagaaatacccatccttagtgtgaggagagcagcattccagacgcttctctgtatgttgcatagaaaaaggatggttagatacatgggcagattaatggatggacagattgttgtatggaggattaggggagggataaatggatggatggatgaacacatggacaatgggtgggtagatgggtgaatagatgggtggacagatggaaggatggatggatatatggatgcatggagagacagagaaatagatgcagagatggagggagggagggaaggagggatggataaatggaggaatggaggaatggatggatggaggggtgggtaggtgggtgggtaggtgggtggccagacaatggatgtgtgagtgagtagatgaatgagtgggcagacagacagacacaccatcagaagcaaatataaatatggaatcaagggatgcctgcagcttttgaattgttgatttttttctttttttaagaagaaaccaaagtaaaacagaaggaattgctgaattcagataaatgtttcttcaccaaaagagaaattcatttctaaatgtcactttcaggttaaggaaaataaaatgtgggacgctggactcatcgtgggtttttgcggtcttctctcagctttgtgtggtagccagcgacgctgcaaccccgcccccgcagcctcctggtgcagcacgtgttcatttatgggttgttgttaccgtggcattggtccaggtttgtgatacttgtgcacagcttgggggctctgcttccctctgtttgttcgtcttggtgctgtgtatgaaggtggcaacagactccccatagtcctctcaccacagacacctcttctcagttcttcgtttccagttggactcatctcctgactggttgggtttctgcctcggtcgctgactccagagggccccacggctcatgcctgcttccctgctatcctcctgtgcactgttggcctttatcatctccaccacgtgctcaacactccaggccagagcccttctctcaaatcccctttggttctagccatgtttccctgagctcttccctctctgtctctaattgatgtgttttcctcccaaaccctccttccttgcataattctgcaactgaccttttttctggccatcctagattgggtttactgttccctggtactcagacctgcttaatgctcatttcttcagttttctggggaagcctcaggggccttactgataagaactgtgtggaaggtaagcattcaaagttcttacatggtgaaaatatcttcattcaaccatggtgccctattgatagtttaagtgggtatagaatttggagctgaatgtaattttccttcagaattttgaagacctcgtcctatggttttctagcatccagacttactattcagaagtcttatacttgctttagtctcatacttttgtaagtggcctttcttttcttcctggaaatgtttagtatctaccatctggactcaggggtttcaatttcccagagaagttccctgtggatggctttgttcattgactgttctgggcacttggtgggctctttggaaactttagtccttgagctctggaaaggtctctgtatgatttctcatcatggaggccaccatctctgttctctctttctgaaattccttttaagtcagactgaagacatttttaatgacactttgatgtctcaactttcttccccttttttatggcattatattcttaactttatctcttcagagttctaggaaatgtttttagcagtcctgtttttaatatcccagagcacacgcttgctctctgaccgtggtcatggcattccgccctcatttgatgggcacgacagctcctaggatctttctggagactccagatacatcttatatcttaagttctgcttaattccttgatcttctgtttatgtttggccagccaggcccctctctctcatgttctgaatgtttttcaatgtttgctcgggatctgtgcatggatgggcctgctggcatttaggatgtgttgacaatgactgggggaggtgcctgtcattacactgaggaaccccatatgttagagctctgaggctgctgcatctgagagcttgggctcgaggtacagggctggcagccgggagtcccacctgtaggacgctctgctgtggcagagggacaggacatggacctcatgctcagccccttcccatcgtcttggtgctgtgggcctgatgtgtgcctccacaaggactcccgccttcccagcatggcattcagagcagcagatggcttagactcacccccgcccagtcttggcacccttacagccccggcgagacccgggtgggcgtggaccctagcgtcccttcaccctcaggctgtgcacctccgcagtgccgtgtcctgtctggagcctgtcacacccctgtacagctaccccaatccaaatggagcctcccccaggaagcccctggtgggaatccgtccccacgacccctgtccggcttccctggctcattgtccctgttacaacccagatttcccttatcgcaactggtcctagcctgtgacctcctggggtggggaatcatctctgcaaacacagctcctccacccttatcagtgctttgtgaaggcagcagaacgttctcctgagccagtgtctgggtcacttgagcaatggctgccaagtccatgggcctgcacgcatgaggctgtgcctgtgtctgtgccgctggagaccttcttgaggttcactgccctaaaggccgcatgaggggacagaaggtgaacacagggccctgcttggtctgacaagcccaggcggggcccttgccgagcgtcagggtggctggcagccaccttctgtgatcgtcctccttctgggctgcggtctagggctgcacattcaggatggggatgtcccagtgggcgcgcagcacaagggtcagcagacccctggctggaggaggtcagtgtggggggctgcgtgggagacggtgcagcagtgggcctgggagctgagcaacggtggctgggatgggtggagaccaccaaagaggaggggccggcgaaagccaggcttcctgcaggctcaagcctggaaaacggtgctcagtgagcaacacattcccgttctacagtttcctgagctcccgagtgcccgccgcaggatgacagtgggacagtcctcacaggggcatgctcaggccctgccccaggcagaccccacgccctggcacgcagccccaccggctgtgccgcctctcgttcctgtcctcctggcaccgccggccacccctcagcccagccctcatggttctctaagccgccgcctcctcaggaagcctcccaggcacccatgctccctgcactgacccccagaccccagctttggccatgcactcccagacggctggtccccacacaaactttctgtttcaaggaacagaaacacccctgaaacttgtctaagaaggaaatgtgtcaactcacatacatgaaaagcctgagtccctcctcaaagtcctcccctccctccttctctctccttccttctttcccccttccctccttccctccctctctgcttccttctctccttcctccctgagacctgggacgccgaggagggttccgttccctcccccaccctggcagtgctcgggggctccagttgaaaatgatgggggacacatttgcatcacagcctgcccggccggctctgtggcccctgatcttcctactgcagcctctgccggggccggaagggcatttccgggaggcgggaacagcatgtatgaaggcagagctccttcccggagaggagggccagccccgtccccaggggctcccggctttctctctccccctacattcctgtctccatgcagcagccagagggactttaaaacataaaccagaccacagcactgcctgctcaagccccccatggcctccctcttccctaggaagcaatccaggcacccttccatggccgtgggccccacgcccccgaggccccacgcccccggggccccatgcctgcccttgcaacatccccttcctgactccacccagcctcctgggggcttccgcctcaaggcctctgtgcctgtgtgagtggcaccctggggttgtgccatggccagccctcaaaccatctgaagtctgctgttggcacctgccctctcctggctgcaaagctgccccctcatggcctcaggtctctgccccagcctccaatccctcattactgccccagcctgtgcctgtgcctggaggctgtggcctggctctccagctggaacagaagctctgagaagacagagctggccagcaccatctctcctgtgagaaccctgtgcctagaacggagcctggtacagaggaagaacccgacagactgtgagccctgtcttcctcttggcaccatgagtcacctgtcaaactgaggggctggcagagctggagggagttccatcccagccccaaggtgcctggagtagcttatggaggtcactgatggcctcaggatgccagcaggccctctgatgcccagggctcattcaagggcatctgccctgtgtcctcatgcacctccattcagggaacctgggctccccactctcacaggggtggagacctgcacctctttttcacccccaaacccgcctgcccgtcagtgcttagagcaaatgcccctcccccgccatcttttcatgactctcccccttcctcaaccctgcgcctggtcaccaagtcctgacaacacctccagcccctgtctctatggtcccctccttgatctggagccattcagccacatggagtatgtcctctgtcgagggggcagggactcaaaggatgagagaaggaacagaggggaggaccaacatctcggctgatcctggtctatttttagtcggtggtgggctgtcactccggaggccagtgactgcgtcatcagtgccttttgatcttgttgccgcaagatacacaggaggcagctgctcactgcttgtggaaagaatgagggcgggcacataggcctggggtgtggggagcattaatgagtgtgagtgagtggcggatgagtaggtagatggacggggagctgcagggagggagggttgcagaaagggatgcgtggaaggatggttgatggatggatggttagatggatgaagagatagatgaatggataaagaggtgaaaggatgaatagagagatggagggaaggagggctgaataaagaaatggatggatggatggatgatggatggatgggtgtgtgggtatgtggatggagagatggatgaatggttaaagaggtggatggatgaatggagagatggagggaaggagggatgaataaagggatgggtggataatggatggatgaatgggtaggtgggtgaatggatggatagatggttgagtgggggggtagatggagagatgcatgaatggatagaggtggatggataaatgcagagatagagggaaggagggctgaataaaggatggatggatggtgggatggatggatggatggatggatagatggatggatggatcgatgggtgtgtgggtgggtggagagatggatgaatggataaagaggtggatagataaatggagggaaggagagctgaataaaaggatggtgggtgggtggatggatggatggggaaatgaagagatgggtgggtggatggatggatgagtggtgaatgaatggatggatggggagatggagggaagggaaggctggataaagagacggctgggtgggtgagctgatggagaaatgatggataggtggatgggtagattgagaaatgatggataggtggatgggtagatggatggaaggagacaaggaaggaaggaaggaaggaaggaaggaaggaagggtggaggtaagggagggagggagagggagcaagcaggcttggatgagtagctaaagcacctcaagcaagggtgtctcccttagaaatacatgtgcctccaagtcctcgaggctggcatcccctcctgctccatctgcctctgcctgctgggcagaccagtctgctgtcctaccaaggcctaggtcttgactctggactcttccatgctcatcagagggtactgttggagcttcctggtcaggctgacccagctgcctctggagcctggcctgggatctggagagaaagcacctgtgcagacggccccagcgctatgcccttctgaggcctgctctgcacacacagctttcctcatcccggcctcatgcactgtgggcaggagttgtcctagcaaccatcatccaggcacctgctgcgtgctgagcaccatgctgggtgcttcctgtgctctcaacagccttatgtggtcagtaccaatccctccccaaattacccccatgctcagggtgtcactgagggtcccaagtctggggtggccaggtcacagcttgaacctgggcagcctttattctctaggggccttgggggtgtctaggctgccaccacagcatccacactccccactagagcccacataggtcttatgggtgccacagcagggaccccactggacctctgtgctttctggtggggggcttgtcagggagctcatgggcacctctgggttctaagaagctatgctgaggcccacagggtagttctgagttcgggggaccctctcctggccctgtggggtcggaggaggtcctgggagcccacctcctgtagatccaaacacctgatctcagctcaggatcgccactccagtgccccatcccagagcctttgagagtggggacagggtgtcctgttgtagttgccaagcccaagaaagatgaggcacccaggatgcctgacagtagagttgcaggggggcaggcaccatcgcccccagccccaggctgaccccagtccctccctatgcaggcagaggggcaattggaagaggctggagactattcaggagagggtgggagcagacacgggagtaggatgggggccctggaggtactgggtggagctgcccccagcccttcctgctggcctccccagagctccaggctctgaggccacaccctcacccaaggcaagttgctcagggggtctccaggctgtatctaacagctgcctgtgccgaaaaattaagcaccgctgagtcgccgcacacctgtcagggtggaggggacttgggggaccagccagctggatatgttcccttgcaggcgggcagggctctggggagtccaagtgtgcgcacagtcctgggtgagggctccgttagatgaatgtggacggctggcggccggggcttgggagatcaagaagtccctgaggaagaggacagtagccaggggcaagacctcacacgcctctgcccatcctgggaaactcaccatggcattgtggttgaagggtcagtggccaccagagagttcctgctgcagtgtggaaaagacaaacaggcgagtgaagtggataaagattcaggttgtgggagggagacttgaagggcaagttggccaagactaaaaagtggagtcaagctcagtgctggtgacgatgttggggagaggggcctccagcgccgtgggggagaatttcaagagccttttgtgaaaatggtcaggctgctgaaagtgagaccacactcaccctgtggtccagtgatctccttctgagaatccgccctggagcagtaacacccttgggactgagaatggcttctgggttgtgcgtcatcgctgtccaggagtggtgaaaagctggactctgactgcctgtcatccagagggagcaaacagccaccctgtggtgaagccacaccacatatgatgaggggctggaggcagcagaaagggggctataggaccctttgactcaagggctaaccatgatgtttcattaagggagaaatgcacttgctgctcctggaacattctggctcactcccgcctcaggcccactgccctggctggactccctgcactgaacgctcctcccagctcatgctttccaaagtcccctgctcaggaggccttccctgagcccctgccccctccatttcagacatctccatctgatgtctgagccctgaacagacacaggtgtctgttcagggctcctcaaatgcacaaatacatgtctgtgaccacagcccaacccctgggcagtggctgcccctctgcctctggaggtcccctccaaaaccttggtccctgtccgcagagggtgtcagggcttgaggtcaacagggaggtctcagggcaacagagcccagtggcactcctgaccccaggagacagagggaacccaccctcaccctagtccacatgcccgacccatgacccaggcctgtggcgccagcctgcacccggctctgctccacaggccaactctgcgcacgctcctttcaagggttaacggtgcaagctcctcacggcaccagtgcgcttgcctttgacatgaaaatgtttttgcagcaggctcggatgccagcatttttgtggttgcagtcagatgtttttaactacgttggacagaacccacggcggccctttccgtggcttcagccagtttctgagcgctaccttgaacccctgttgcaccccaggaggagaatcacaccagtgccccctgacccccagccttgtgcagacactgatacccttaggatgaagctgaccccagtcgtggcagccaccccagcagtcagggaaggacctgctggggcatttcagatcctgagcagcatgtaccctgtgaaagaacaggttccccaattttggttcatggtacctgagatgacggcttcagatgatgtccctggccagggaggtggaggacgctgggcagagccctgggcattaactcagggccatcacagaggtggtgagagctaccccgggtctggggactgttagcacagacctgagccgaggcccccttctcacaggggcctacccacttacgacccacctcctctcctccatggcaaaggtgatacattagactcaaagagacatgatatccccttgggctgcaacttaaattccaaggagagatcctgaatccagagtcacatgtatgttagaaacctctggcactctcccctccccagccagcacctaccagctttgcgcaaatgctccacatttgcattttaaaagccctgagaaggcctgcagtgaaaaaaactaacttcgtataacccaactattcccaaactctatctacaaaatatttttctcttttatcattaaagaatatgcattaacacctaaaacccactatcctggcaaaaaagtggcaggattgtctgaaaaacacatggccagccaccctgcaccctgagttccacaacatctaaacccagtgtctgctggccctcagagtgggagcgcgtgccccaacttccgagccctaggaaagggtcttgtctgctcttcccctcagtgtcaggtgacccaagagtgtgggggtcaggaatggcgtccttgtgcccttgtcacccactcctgtgggtacacagcttccctttctgcaaagtcacaccccaagccctggcttgagcatgtacacaggctgcagcccgtgttcctggagccaccgtcccaggtgtggctaaggcccccacagagtgtgcatcctaaggtggttcagaggtcctcagaaagtgccaagaggccttcctcagaggaagagcaagggtaggtgcctctggcatgagccagatgatgggagctgtcacaggactttgccacccggggtgaggggcctagaaacccctctccaccagatgccttacaccccccatccccacacgcacacagcttggaggctggaagcccccggaatgcggcccaccctgtctccagttgttccctaccagcccagctgctggtccctaaccgggcccacctgttgggtccttagcaccagctgcccagagcccccagcccctaccctagtctgatgacccaggcctttccccctgcccaggctagccttgtgctcagctgccagcacagcccccaccacacactccccaacaggtgtctccacaactgccaggagacagctcagcttagctgctcttcccccaacccccaggcccagcagaatcacatctaggagagtgggccacatgcctcttggaaggcaggtggcacaagaggttcatcccaccctccagcattacccagccccacaggacccacatcctgctcccagctccagcctgaaaggagctagtcctctccagcccctttgaaaagaccagctggacattctccagggagattctgccctacaggattagggagtaccctcacctggcctttgttcattggttcattcattcattcattcattcaacaagtatttgccaagcatccctatgctccaggcatcagtggtaggccagacagccaaagtccctcctcccaagggctgtggcccactaggaggacagacaatgacagagcattgtgtgctctatgcctgcccatgtgctgaggaaggagcaggagaggaagacaaaccagagtttaagtgaggagtgggcaaggcttttatgaggcccagcccaccctcccctgggcaagctggggatttgggaatgggagacatccaacacgtgtcagcccatacatgagggtagaagtccagttgaaaacacacctgaaacagcagggtccaaacaccaggtgccgagagccttcctgacattgaaccttccttgaattcctgaggtaaaccttatgtgatcttgactcaagtccagctgctgatgcatttttaggttttagcatctgtgttcatacctgatttgggcctagaattttcttgtgtttgcttgagcagttatggtgcctggggttttaccttgtcagataagttgagcaacctccccttttggctagtgctctgggatggatgggatggatgtcgtctgcttttttaggtaattatagaaatcacccccaaaaactagactggaaaccttttagaggagggtaggtaactggcatttgtgtctccccaatgggtttatgtttcttaggattttctaccacataagccacttttggtattttttgccttgaaacttatccatcatattgtgttttcaattttattgatatgaaagtatatatcataatcacttacaattattcaattccctcggtagcagtagtattcattcctaattcttatttgttactttatttgcttaaggtttatctactttactggctcttcaaacaacctgcatttggttttattggtcaattctttttcataaaatatttttctattttgctaatatcttcctttgactttgttcattcttttctttgtatttgttttggtgttctttttctagcttcttgagttgaaagcttagcacatttattttcaatcttttttattttctaaaattgccatcgatacttctccaaataccctataggaagcatcccacactcttggcatgtaatcagctccttgtaaatccatcctaagattttctctctgccttattttctctttaatcaaagagttatttagaagggtactttttaaacttcaagatgtatccatctgttgctatttttattaataattttctattttacatcaaggtacagatttttagaaatttatggagttttcctttggtgcctaataggatcatttctgtgacctttttgtatatgtgtggaggcggtggagtcttttctgttaattgtgttaaacttgttagtggagttctgcgactcctccacctcctgacttaccttgctgtttgtttgtttgtttgtttgtttgttagtttcacccactgtggtttgtcagtttctgagagacaggcactaggatggccaataatattgtggatttcttgatgtgttggttttgttcatttgtttttcctgccccatcctctgggcccttaaagcctgggcacatgtgtcctctccttacgtctggggaaatggtctccattgagggtttgagtctgcgtggcttccgcctcccttccctcctgctagagcccctctggaagctgctggaagccatgtcctccacatcccctggctcttccttcatcccatactttcttctccctgacagagctgtcaaggggagtgcctacaccccacctccattgctgctcaccctcccctggcccgtgctgggcctcggccatctctggggctgtttctaggcccatctaagcgaggggttccttaacctgccttgcttttgcagctgcctgaacctccctctaaggacatcagcactcttcggaggccaggtccggcctgctctgctgccttggtgggaagctttcgtccctgcagggtggggtgggtctgtcaagtgttcggtggcccctggctggtgctgtagcaacacgggtgtcagagggcggacaccgaagcctggtgctctgtgcgagtcccgtttcctcgcctctcagctgtgtgactccaggtgcagaggccccgcgtggggcaggagcactgcaagcgagaggatgggaaggtggccgtgggcctggcaagggttggggaatatggtgagaatggtgcccatggggtcacgccagccacacacactttctcgagaagtttcaagtggagccacagggccattgtgtgtcctgaatcattgctctggctgagggagtctggggacccatgagggccagatggatgggctcagatggagtgggaggccattgggaagtggctggtaaaaagcctcatgagggcagagccccactgaccccacacagttacccatggtgtccccttccccacgtggtaattctggactgttcacagtggcttccaaggcctttgggatgggccttgcgtgctgcccttctgctggaaaccctcccagccatttgaggtcctgccctctgctcaccttgttccctgtgcccatgacatctccccaccttttcctggctgctatgtactggtcctataggggttccttaaagggtgcatcttccaagccactcctgttgccctcctctgcagccacatccctgctctgcacacccccaccccagcaagtgtgtgtgagctctgtagtcgtgtcatggccccagtgatgtcctcattctatccctgtcccttcatggcagagtggactttgcagggtgactaagtgaaggatccagagatggggagatgatcctgggttatccaggggccccgaatgtgatcacaagggtccttctaagagggaggcaggagggtcagtcagcggagaagacagggggatggaagcagagctcagagaggctgaaggtgctgtgctgctggctttgaagacggaggaggggccacagcccaggaacgcaggcagcttctagaaaaccggagaaggtgaggaatgaatcagccctagagcctccagcaggtatcagccctgctgacaccttgttagcccggtgagactcctgacctccagtgctgcaagatgtcacacacgtgttgcgctatgcttgtggtaacatggcaccacagtgcaggatgctgacacaagcaccagcacagcgccaggccctggggtatagtgtggataagatggactggaccctaccctcctagggatgtccctctaggaggtggaggtggggaaatggggacagatattaggccattatggcagaatgcaagtgtttagttagaactgtgctaagtgcgtaaagagagctaaaggctacataataagttgtgagcctacctagggtattagcagaggtgtcccaaggaagctccctgtgagccgaaccccaaaggatgggtggaaattagcttaactaagtggagaggtgggatagtcatgggccaaggccccaaggcaggaaggaataggcctggtctgtgggtctgagaggatggagagggctgaacacgggccaaaggagaaagttagggagggaaggtggagtccttggcaggggctcagctcagaacagggggagccccaaaggatgtgaggcaagggagcaatgaacaaatctcaccattgtaagatctgaaattcagaacggtggcataggccagagtaggacattgtgaaaaagaaacaattagagaagcagaaagagtgcttggaaatgtcaattatgctgctgaattaaaaaaaaaaaaatcagtaaaagatggaagtaaatctccctgaaagtggaatgaagactgaaagacagaaaatcagaacacccaagaaacatgcagactcaatccaaggacatccaatatcctgctattggaagttccagaaagggagatgagaggaaatagagactaaagaaagggcccactgagaacctctagcagaaaagagcagccactgtgtcatcatgcccttcaggaacagcagagataaagacaacattctagaatcttctcaaagaagtaacaggtgattttccaaacatgggcctctgaacagatcagtctttggtagagaaaatttatgaagagagatgccttcaaaattgtgaaggaaaataaaattctatacctagccaaagtatctatcaagggtgaggatacagtaaagacattttcagatactcaagaacttataaaatttttccaagtcactgcaggaaaaaagtatagaatttgctttctatcccttttcttagaaggttctggagaatgcactccagcaaaacgtgggaggaaaccagggaaaaggaaggcaccaacaacaaggaggcagaagaccctacacagacagaacagggaggtccaagcccagcagctggctcagggctacaggcctccagcccaggcagcccaggcaggagcagaggacaggatactcctgaagaggccacccaggaagagaaaataggtgggactgggaagaaaatctgcaacggagcttccaaaacagcggaggatctccctgagggaggtgttgttagagaagagagcagagaagcaggagaacccagaaaggaaatgtgagcacagtataccccctggctctgtgggggacccaggcagtgggcatagatttcatcaaaacaatggggaagctgtgctggacagttagagggtggacaaagccgagggtggggtgagagcttaagcctcaccttcatacaaggaagattctagtagctaagattgacaagtcgagaaaccatgtggccagcatgtcaccaaaagctgataagaggaccagtgatgggcttcccgggagtggagctgggcatgcacactaaggcctggaggcttgtgcttatccatcatatagcaggcctgccctttccacagcacaaacaccttgacacacaccgtcacacacacccatattcgacacacacattcacacaaacacacccagacacatgcatgcacatggataactaactcttccagcaagagccaccccctggctgaagtgtgaggctgtccatggaggggccagagtagaggggaggtgggtgaggaggctacgcagaggccctgggaggagggaggctaggcccaggggtggaaagaagacagatacgagaggggatttggagacacaatccccagacttggggacgagctggatatggtggtgaaggaggggagtcttcaggaaagacccccaggttctggcttggccatatgttggaggctgaaacgattcatccagacaggagcagggaggaggacacgcagggcctgaaaggttctgaggtgtccacgtggaggtgtttgcccggcagtttaggctgcaaggctcagcagggagattggagctgaaaacagaggctgcaacatggaggtggtacctgaagaaggggtgtggatgaggttgcctggcaagagattgcagggagaggagagagtgagaatggggccactcaaggggtgaacagggccttgcagtacaggaagcagctgggggtggcgggaagaagacagtcaggagcttgggcatcctagaggcccccgggacagctttgaggaaggaacgtcccctgggttccacaccacagagccatagaattctgtacttggcctgtctcagtgccgtgccgcatccatcctgcccctggcaccggagggtacactgatcagggacacgagttcccctgccgggcacagagcaggttcccagtgagttctggggcctcagtgactgggcaaggacaggggcgtttggacaggggaggccgggtgtggatggaagctgtacgatggggcctgggccagggattgtgggccagctccgagctcagacattggtctgcacatgtggctggtgcaggaggcgcagtgtgctgggcctcagcctggacacggctgtcccatgcgcagagacagggtcacggtggaaagagagtccagagaacatgggaggtgccgtttccctgcggcgggactggggctggggcccggcttccccgaccctgctgtcgggcgtgtgccttcatagcccaggaagccagttcctggcagggtgggctctgcagccaggccgccagggtgcagacccagaccaatgggaggccaagggaggcccgcagcccagaccttccgagccctcagcctgctcagctcagtgtccttccagggaaatgggcgtttcctgtgggaaggtgccaggggccccgggtgctggaagagcaagcaccacgcgggggggtaggggcgccccagccctctactggccagtgtccctccagtcgtccagcccttgctgccaggggccccgcccatgtgcctggaatcacaccctggacgcttccttctttgggttagatgtcgtcgtcttcaacaaatattttctgaatgtctgctatgtactagactctgggaacacaggggaaagtatgtggacctgcccatgaggaagtcagtacagtggggccatgaacaataaacagacaattaattatccttcgcggagctgcgcgggggcagctctcccaaagcagtcagtcattcacacttcagtatgaatgagtctccgggtactttgctcagtaacggactggaccagcgcggcctccacgccagggactggggcaagggtggagtttggagtaaagagagaggcagggcaacccctttccacagacactttaccacctccccacattgacaagctggctccccagggccacccggagccccttcctcagatcctgtccccattggcatggtctcagcccctcctgccccagtaccctctccccgaggcctcgtcctccccgccatcctggaaacgattttgttgtctgcagagattatgtgtaactgcctgtgagttataagcctccacagcaagcagcctgttacctaaccaggcctggctcatgccaatgtcttgagtaattattggggggcgggggctgtccagcccgcagcagaacctctccgagggagtgctattgtttttcatgtcagctgcattttaaggctacatttcacgtcagctgtgacttggaaggaaagagggcccggcctttgaaaaatgaagaaattgagccggggttgggggcggggagggcaggttaacccttcgggctccagtattccccagcttcccagggtctcctggcagtaaccaggccagctgggggtcagaacccgcggccaggcccagcagccgcctcttggcagcgctgatggaaaccgccgtgcggttccgcgcagacagtcacggaaactcaggcagacccggcgttgggtgcgccaggccggtgtgggagcactttcccccgccccctcctgctgctgcttccccgaaggcctccccagcagacctgcagctgggcacccacagggtagaaatgccctggattggctgtggcacaagagggctggcccagcacacccagcccaccactgtgctcccagagggagaacagagaggggtgcagagggccagagaggcacggggctcccctgggcacccctcgtcttggggcccctgccctgcctccactcagaatcccactatgtgcttggagccatgctgggtgctggggagacacactaaccacttccccatatgctcacagccagagagacacacaggccagcagcctgtaaaccactgggtgtggggtgtctggtcctggagtgacaaggacagggaggaagaaagccaggcaggtggcccatgagccgtggagtaggtggggaaggggacatctccaaggaggtgacatcggagcagtcctctaaggagtttggagtcattttcagtcactcacaagccacaggagggcttcagcctgaagctcagaggtgatgtgcttagatgtcacagagccgggaggggaacaggctgggctgcagagaggaggccaggcacagtcacctcgtgttgctgtcccccaggtaggagataagggaccagagtcagggcaggtgggagaaggggaggttcttggttcagctgctgctgagacagtgaccctggggacagcccaaataagagagaactttgccacccgcagggtcccagagtagcagaagcttcagggctgatgtgtgcctggtgaatcagcctggccccagacctcctctctctgcttgctttcctgtccacaatccagtgcttctgtcctatggtccccagcggctgctcctgcattcaccatcacatctgcattccagcagcaggagggaggtaaaagacatgaaggacaggccccactcctgtaaaaccctacacagaagcggcccacgtcatccccctttctgtccacccgccggaatgtgacgcacgcctgagtcgctgcaagggcccctggggacggagtctctattccaggcaggcaaacactcagcttaattcagggttctgttgattaaaaaaaaaaagtggggtcgggggggcgggggagagcggctatggagacaagtggctgttttgccagagggaaaattccacatgtggcttggaggccagaccagaaggactcagataggagttgggcgcttgagggaggaaatgggggtacacttcagcggctcaggccagggtgtaagtagcaggtatgtggtggtactgttttccggaatgaagaggaaggggcgggcagaaggcagcgagagctttgtttggggtgtgtcgaattcaagatgcctctgagacatggaagtggtgaggtcaggggccgggaaccctatggtggtgttggccctgagtccaagccaggcaccaccgggcacatagaggtcttgaaagctcgaatgtggggaggccagcaacagagggaacactacctgcaaaggggcgagggcaggacaaaggctggcagcaccacacaggagccagcagggaaggggccacagccgggactcagaggaggcagccacgtgcagaaaggcacccatgggaacatggctcctgggagctggaggacctcagcaggcagggactagcacccaagaagaaaactctgagaagtcaggacaggagatggtgtcgtcagggggctgctggaaggtttggtgaccggagcagcaggtgccagagctgaaagcactggttaaacgtgatgggtaaacacatgtctatttcagcttctttgaatcccactaaggtgacagtaaaggcatgaaaaacatggaaacatgtaaatcaactagggtaaagtggtcaggagaaaagaggagaccaaaaatatgttgacaaaggtttggaagctgggaagcaggaggacagatggagactggcctaggagactggagagggtagacaccaagccctgcaggaagaagagccaccaagaatgaggcagttcccaacccaggaccctgacaggcaggtctcaccccagcccatgaagccagatgctactgattctcaagctcagctagagacaggttgagtctccagaaaagctgagcctgagaggttctgaacttggagccaccaggagcagttgtgggtggggcaggagctctcgtgatgaaaacaacagggattcagtaaatgcattcaagctaaaaaggaagacctcctcccccacttccctcatcaactcccagaatgcccggtggggcacaccattgttttcagaacaccagcaataaagcagacactccacatttccagagagaaaaagtaagtcacacacaagagaatagaaaatcaaaacggtatccaatttcttaacagcaattcagaaagctagcacatagtagagaaatgccttcaaacatctgagggaaaaaatgatttcccatccagaattctatacctagtcaaactctcaggtatgagaatagaataaagacatttccaaacatgcacagtcaaaaattgtatctaccacatgccttttctcagaaagttacttgaggacgtgctctagcaaaatgagaggaaaaaacaaagaaagagaaacacaattcaagaaccagggagactccaacaccaaaaacaaaaggccaagagaattttcaacatgagtgaaagaagttctagcattacagctgctcagcatgcctacagtgcaaacagtcctgctaagactccaggaagaaatcccagaagaaaaaaaaaatgaaggtgatagactgccagtattctcaataggatgaaagaagttttacaattcttacagaaagttcaagaatgaattagtgacagatgcagtaaaaaacaagcaaaacctaaggccatttgtaacccaagggaaaacaagaagatgtaatcataacagaccacaggacacagctaaaaacagtgattacatagtgacataaagagttatatactgtttgtgtaaaatgcaaacagtaagtacttatttagcctagaattctaatttaactgtgttggaaagataagggagtggggagggcaggggcatgagaacaaaatcttgatcacttctcttccatgttaggcagtcactagataatgtctaaagtgacaaaatttcaaggaacagcaatgtaaatgtgtagtttggaaatgccaaggtaaagccaagagatagtcggtagggttgaagggctgcctctgggaacagaaattagagatagaagatctagcgcccagggaaggctgtttaaagatgggagagcttcacgggttttctcactaagggtaagaaaatttaagaaggaagtgatggtgccagagaatagggaattctgccaataccctggtggggagggggagggggagggggaggaggatgagaaggaaggaggagggaggaggaaggaagagggaggaggaaggaggaggaaggaggaggaaggaggagggaggaggaaggaggagggaggagggaggaagagagagaaggaagagattggccaaggagctctgagaggggaaggtgggtgcatgccaccctggctgggaacagcaggtgtgtggtgaaggggaaagaccagcaggccctttacaccgtgggcacaggctcaggactggctgggtgctacgcaggagccctctgactagctggggctggggctgtgcaggataaggccagtgagagaagaggactcactggtgggtgcctcctccccacctttagcaagggttgacagagggatctgggctcttccctgggcaggcatcccagagctatgacctgaatgatatcttagatgatctccaaggccccgggatctaagtccctgttaagtcccctgttaaaggacctaggtcctcccaatggcctgcaaaccacacccagtctagtcagcatgtatccccacaccccagtcccagtgtcccaagaacctcttcctccagccccgggagcaggaagggcgggctgggagctgcaggatggggcctgaatctctcatcaactcacagggtcagcctgggccaggcaggctgggggccagcccaggacctccttcctgggtggagaccttcccacccttccactcaccttccgagcattgtgggccttcccaggaacccccacatctccgtggccctcagacctctgacctcccaagggcaccccacgtgtgtgccctccagcaccctggccacagagccacacacctgggccttcccctctccccatcatcaggtaacccagcacaggctggcccaacccctctctaggcctcagctttcctgtcaggaaaatgcagggttaggagctgaccagggagtctttgaaaccgcaagggtacccttgggagaccccgtgcaggtcttgtcaaggcaggacagggaagtggtgatgatgagaggcagctggtctgggtgctcagccccaccccagcacccgcccaatgggccccctgagggaagctgcccatgctctctgcgccccattttctggcctctggcatgcagagggcagccctgcctgcttcccagtatggctgtgaagccaaaggcggcgatcaatgggatgttctcagaatgacaggtgctctgtgatcagcagcagctgctacagggatggccatcgggtgcagggcaggatgtccctgaggaggcacctcagcagacgtgatgggtgcctgtgcccacagttgggccatgagaagaagtatgtggcccggcctgccctacaccatcagggggtgcttggaccagtggcggctggaaataacccatgaacaggggagagaaggggtgaatgccttgtaggcctggaacactgtggggctgtcgaaggtgcttctgcctccaggaagccctccctgactgtggagacacaagaagctctccaggtctctgggtccctctggtactctgtgccctgaaccaccacccttaggcccagatctattcctgatccttctctagacttcagtcagtttcctcttgatgtcctggatggccacaaccatagtgtcccctccgctcctctctcccccgcttccttccacattgcccctcctcccctttccccttccccaccactgctcccctccttcctccagcacccttctccccgctgccctcccctcccctccccgctgccctcctctgcctctctccgttgccccctcctccctcccccaccagagccctggaaggctaggtacagcgaggaagtggccactccatgacccccagtgatttcacttctctgagcctcaagagtctcacctgtccagggtccatgggatatgcctgactcagcccctggcacatggtcttgcagtggcctgagctggacatgcccctggtaggaagctggaaaggaggccctgcccgtgtaccaggagcctctgctccaggggggtggcctgaggcccaggcagacctccacctccaggcagccctgcaggtggacagctgggcctcaggcttaggacctgggacaactgcctagactacccccagccttcctgacaggtgatagcttcattgtccccaggacacacaccagcccggtccccaccctaccctttcccagcacccctgagggaaggcctggcccctcaggcacagtgggggttgcccggcatcttggcagatgggcagcgttagagaagccttggacctggccctgcaaatggaggtaccagagggctgaactagatgagggacttgaaggctcagatgcctgtgcgggacctggcagggtgggggcttccgggctgggagactaggacagggtgcctgtgtcccctcctgggagtggggccgtcagagctccgaccgcacagggtcatggggagcaagaggaaccaggatacccacaagctgctcgctcagacgggctctgcgactccacaactcaccttcccctactgcaagatcagggagatgggacgcagtccccgcccatgcccagggccttggcagggtcaggagagccagtgcaggcaaagcgccaagcaccctgctgcctgggagaccacagttgcagcaggaagccctcctcaggtctgcccgcctccccggagcatgttccctctgtagctcccggtagggcctgtgtggagaaggttgctgatggcatcactgagcggcccagctgtggggtgaaaggcaaggctggggctgatgctccccaaggcaggaggagaccatggtctggctggggctgccccaggtgacaactgtagggtgtggggaaggtggctgccaccgccgtggtccacagggcctggccagggctccatggggcagaagccatgcccagctcagggggcttcactccactctcccactttgacctggtccctcccctctcccccagagtgacctggacactagcctcctcccagtgggagacagatgtgggcaatgcagctgctgttccctgctcagggcaggctggtgcccaaggactgcccaccagaccaggggataagaggttggcagcatcgtccatggttatcccacagctaggaggctgtgggtgtgggagaacatgctgggtaggggtgcctgtgtgcctctggagtcgaggcaattagaggccctgtggaagcccctgcacgcaaggggcccacgcgccagggcagaggacatagccccttcttgcttccctgagggacgggaggcctgtggacttctggacacaatggcagagtcagggcagccaagccgggccagtgccctggagccgagtcctccccccacctgcccacatgccccacccctctccaagcttctcccctcataggatcccagagccccttgggacctctgtgaagactgcatagatgtgagggagtctcagccttagggtgggcacctgggcgcagctgtcaggccccaagtcagccccaggcacgtggacctgggagccagcctcaagggcaggggtccccgagcatccccactgctgccccgccagcaaccgtgtcactgggaggcaagaggctgggttcctggggtgggcaggcttccccgcttcactccatttgcagcccctgtcttgcagaggcaaaatggaggttcagagaggtgagcaaacaccaggtcccatgtttgcacctggctgtgaccgtgcagtccactgggcccagcagcaggaactggggcaagtgccccgagacgggaccgagacaacagtggggaaggtgggacaggcagctgggggaaggccagagtgtccagcaccagcgccaggggccgttccgacaggctgaggagcggcggggagcggggcttgccaaatatgtccagatggggctggagccccagcaacttcctgccctcccagcctgctcccccacctcctcacccccttcccaggctgtcagcaggggctggggggcagcagaaccccacttagccacaaggagtgcagccaggggctggctcccgggaggacatgggcagaggcttaggtccccttacacacacacactgctgcattcgtgcaggatgggctcagcgcctgctgtgcctggcgtggctgtgtgcatggcatggtggtggcatggtgggagtggtgtggcacatggtgtggcacatggcatggctggggctggggctgggttgtgtagcatgtggagtggcaaggtgcgtgacatggtgtatggcatggtagtgtgcccctcgagccatgtgtccaggtggggcagatcatggagggcgcccaggtgcggtgctgaggctgagcatgcactggctggggagggtgggcagagcaggaggaaatcccttgttctccggagctggagagccagaaagagccctgcagcctgggcctcatcatcacacctcgccctcaaggcctccaggcacagcatccactgccagcctctgctcctgcctctgagggtctgtctccaaggtcttttgggggctgccccagctcccccaacacagacagcaccagagctgggcccacctgtgaggtgctgagttccccatctcagagactgtgcgagcagaggcagggaggcgcttgatgtcggatggagaaaggacaggggaggggtgtggggctcagggccccgccaggtgaaggaacaagcttggaagggtgtccttatgtctgagagttggggagacacccccaagccccagatgggcctcgaatgccaggcagggccaagctgggcccagaagtgggaaggatcccttggctgccccaggaatgcaggttccggggcaagaatccagccctggctggttgaagtccatcccaagtctccctccccacgaggctcctgcagatgccaggaatggggctggattccagattccaagcctggccgcccagcccctatctgggaccccagcccagggcccccaggcctggcctccaacctggccccagcctcaggggagctgaattcagagaatcctgtcctaggagccagaagcgggggagggagggagggcggccctgtcctgggtgcaggcccgggggctgggggctgcccgcccgtctgggtcagccgcagctgcaaaccggccctggctgagtcatggggcctccatctccaggcctggcttgaggtgggaatagcagtgaggttggacatccaggcacctggagggtgggcagggctccctgcggctggggtggccagtggcacctggctgttgcccccctgcaccccagccctttggcccccaagtctctgccacctccctggggttctgctcccatattcctcacacccagcacagaacccagcatgtctcctgtagacacctgcatataaaccctgactcacacacacacacacacacacacacacacacgcacacatgcaggccaggctcctcggccagtcaccctaccggcagagctctagacatttctggcctctggtgactattcttcaggcagctcaccctgcaagtctttattgagcacctactgtgtgccaggcagtggtacagcaagggcagaagccccacctccaaggagctgaccccctgccgtggcagagacagaaaacaaaggcagcaccacagcgacgagggcctgagaggaaagtggagcaggagcctgcagcatgctggggcaggggtgtctttagaaagggtactgggagggccctggcaagggacttaagtaattacttaaaggagggaaagggtggcctggggctcacagaggaaaagccttcctcatggaggcggcggggcagcgggctcagcctgcagtgtccaggagcgacgggaagcctcgtggggctgttgggagacagcaagacctgggtcagcagagcaccgtgtggggtaagcagatgacagggcagtgacagggtgatcgggcccggtcagtggtcccaggggtcggggacaggtgggaatcgaagtcataggaggcggggcaaaggccacggggaaagggacagagctgctcccaaggacgcaccaccatggggtgccccgtggcgtggcgggggtgggggtcaggacctttagcagaaggtaaagatgagaccaagaggcagatgggtggaagagttgaaagcagccaagtgtcaccaaggcatttctgagggagagggacacgactagtggctcaaatctttagaaatgaggggatgggtctggtagagcaccccagattcaaggcgggtggcttggggaaagcagggagaagggtctggaaactgctgctgagcaggagcccccacacccacagagcaggtgcagggaggcccatctgtccatccgtctgtctgtggggaggcatggtgacgtttcaggccggaggtagaagttttcacccaggaggtagagggtgaggccggactgcactccaaggggaggaggtgggagagcacagcctggctgctgccaccaagctccccagaagaggggacccctccccccgaacaccagcacatgtaggcagaaagacttggcctgtggagccctcagcctccacgcccaccagcagggactgggtggtgatgtcagcaatccccacagaaaggagggctgcacagccgtcccaggagccagcactgtccccgtgattctacgtgcagcctccacaagtgtgtcgcatggaaacaagcagtggagagccacatgtgtgtcacatcacgcctcgcctcactcgtgctaaacctcgctgaccaggcagaaccaggcacgagctgcgtatcaaagttgctggaaggagaaacatcagatccctaagctggttacctggcaggcaggggccctagagggaaatggggcaggtgaaatggagatgtgtctttgaaatgtctttatttggcgggagaacgtcttcatagggtacttataccatgaaaaaccctgtacacagactaattttgaagcaaacatgtgaggcgttcacagaaagggttcaggaagacaagcaccccagccgcagagagcccgtgggctgggggcacggggcatggcagccctctcctggggatgggcaggatggggcacgtagggcggaggaagaggctcacatggtgtgcgtgtttgggagcaccctgggcagcctctcgagtgtccagagagaggacaccgtcttgagccagcagggacagccaagagcgcccggggagaggcctgggtggagacagaacacagcaggctgtgggcgtggccaatgttgagggacggaggtggccagaggcctctcagtggtgcccagggagctggggacgaggggcctcatccttcccctgagcccctcccttcaggcccagggagtggcctggggcccaggagagcccgctccgcgctcacagcctccgttcccagacacgcccgggcctgagcccccaggctgcactgtgccacagaacagactccccggcccctccctgctcgagaggtgaccaaggcccagggtctcccagcgagcaagaggccattgaactgttgttggctgtgcagtgccctgccctcggggaggcggcctctaagaagcacacaccaccagcaggaaccgggcagacagaggtgggggatggaaagcaggggaagtggccacagccaaaccaggagggggaagggagggggcctcaccaaggagaccctcacctggggcctggagaatgagaagggtctggaggctaaggagaggggtggatgctccaggaggcagggccagcccatgtgagggtcctgaggtaggaaccagaggaaaccggctctggggcgagaagggcggcgcccagggggccacaggggccggcggcgagggaccctcagccgaggctggtatctcgagaacagcagggatgcctcaaaggttctcgcccagcaagtggacattgtggtgtgggagatcagcaggtgccggtgctttctctgtctgcaggaaggagagggggtcatgggccccagaggcctctgtcttagagaaaaatggtggcaacgtgggacagactgaggaagccagcccagaaacgtcccgtcccaaattcaggaatatttagggtatacctgctgcacgccaagggcagtttcaggaaggggacctacttctgagaagcaaacaccaccagtagggaccaggcagacagaggtggggatggaaggaagccagactgacctcacgtggctcacagccactggcagggtcgggggacaggtgccaaactatccacatgcccgtcaggcacctggaggagtgtgaaacggcatgcagaaagaaggaagcaggcttggggctgggggccagggaccggcgcgccgggaagcaggctgcagagtgaggccagggatgggggctgggccagaccacagggttgtgagcggactctggcattgatccggagccactgagggttagagcctatgactgacaggggtctgacttccagtggtatggggccaccctgctgggctggggaagggaggcgagaggaagtatctaaggtctgcttgtggacttccggggacagcgaggggtattgctggggtcctaggggctggtgcgctcagaggttccagatggcccagcaagtggctgagggcccagggtaggggaggatgtgggggcagcagggccgatgtgggcagacctggagcaatgacacgagaacggccaggcagccctggcttcccctgcccacctgcccccgtggccgggctggggtttggctgaggcagcagagcgctcgctggctgcccgaacaaagtgttctgcctggtgtcccctggcctccgggcctctgcgggctcgccagagggggcagctcaggaggcagcggcagagaatcaaatgcaggtggggcctgtgcccaccgccagcacaaacacggctcctgggcccccagcctgcccgacgttcctgcccgcctggcccccaaacagaggccgatgggacgagccctgcccggggttgcactaggtgggcaggtgggcaggtgggcaggtgggcagctgcctcgggctcttggacagagccgcccctgcctggcgtctgccggcaggaagctcctgaggccgggctagggataggccagcccttgggggaggctcgagaccccatcccagcctggggcttccccaccccctcccacctgcctggcagtgaggcagctccctggcctctgggtgcacctgggcctcctgcccaggccccttccaagggaagagggcaaaggggctccagtgccacccagggagtgttgtgccacgtgggcccccctggctctgccactgactccctccatgacctctgtccccaccctgaagttgacatgaatgtccgcacggagcagcctctgcaggtctgtgaggctgtggatgtgacagctctggctctggcacaaacgtcagccccaacccagatgcagggagggaggtggctgcgtgtccaggagcacggggccatgtggcaccggctcatgtcagcagacacggcacacatagaccccctgggggctatgacgaggtgagggctgagccgagggagaatccaggaaggcgtgcgggccgagaggaagaggaagggaggctctggtggctggagccagctgggggagggaaggcagcaggggctgggatccctcagcccccacagccgtggtgcggactttgttgtttgctcagagtacaaagaagaggccttctccgggttcttagcagacgagcgcgacctctccgaccagggagacagacaagaggggaggttatgaggtcacctgggagaggtgtgggttccagctcccgtcgccactccccgactggatgccagaacgagcctgtcgtctttcacctccagacagcagggccctggctcccagtatcaaagcatgtacaagagcggtctctagggcagttctgcgtagacgccaaagtacaggaagacgtgcaggaactttgtgccgtcgacccttgaacaatgcagggttggggcaccgacccccgaactgcccagtcaaaaacccatgtataacttttgactccccagaaacttcactaatagcctcctgttgactggaggccctaccaataacataaacaatcaattaacacattttgtatgcttcatgtattacaataaagtaaagtaaggaagagaaaagatattcattcagcataagcagatcattgtaaaggtcttcatcctcgtcatcttcacgttgagtcagctggggaggaggaggggtggctcttactgtctcgggtgacagaggaggaagaaaatccacgtagaagtgcacccacacggctcaaacttgggttgttcagggtcgatgatacacaaaaaggacattctaatccagtggggaaaaggtccatcattccataagtggtggggtatcagcaggataacctgcaaaagtaagtctgtaggtcagaaatcaatcccaggcgattcaaagatttagggggtaaaacacaaatcaaaaaagtattaggaaaaaagattttggcgttggaatggaggaggcccttccaagcacgcacaggatgagaaggcataaaggaaaagatggatggctttgaccacgtgaaaaagtgaaaacataagtaagacctctgtgtggcaaaacaaaaaaataataaatgccataaacccatacacgagacaaatagcacactagggaaaaacatgtgtgatgtgtacttgacatctttcttaacatagagtccttacaaatcaatgaacgtgaaaaggcccagtcccagcctcagcttctctgctcagcacccaccctgggagggagtgggcttggggggcttctaccccctcactccagccttggggccccgggaaattggccggggcctcacttactaattcaacaaacatttgtgcagcgccaactctaccctccatgtatttactgggcaccttctaggctccaggctccaggctctgggagactgtctagggttaagatggtgactgcctggcctagagctgggcctccagctggtggcaaaacaccaagcaaggagatcaataaaccgggacatttcagggagtggtgaaggcttacaggaacatggggagagatgagacgaggaggccgcccaggattttgagctaaggttacaaagcagcagaggacagcgggtgcaaaggccccagggcccaactgagatgggcgctcagatcaacacgggcatgctcagtgccggagaggggccagcggagcctctgggggcactgcaaaaggagactggattttactcccagtccagtgggaattctgcagaaggatttggcccaggctgggagggaaggctcagcctggctgttgcctggaacaagcggggaacaggttgggggcatagccaggcagtgaggtggttgtgacagtccaggcagaagatgctgccagcctgggcaaggggcatggggggcaggctcagagcacatgctccagaccagagagccacagacaccaggtgcacaccagggaccctgggtagttggtcgtgccctgtggatacaggattcgggccggcttgggaggaatctgagctcccgctgggacacgctgagctgtggggctgttggcctgcaggccttggagcccctggagagagcaagtagctgacggggacatcctagctagccgaggtcccaggaagggaacgagggtcgtgtggtgacgatcttgagatattcccccacagtcgtcagccagggacatggcgcccctgaggcccttggggggccaagcatccgtcagtgggcagaggctggtaaaagtggatgtcagcagcagggggaagggtctttctttcaccatcttgggcctctctcagagggaggcaaccccgctcctggggggtggtcagtgagggccagccaggcagcggcagccccaggaagggtgttggggtggagctgaccaggcctctgccgcatggttgcgctgtgccgaggacccgctgaggacataaccgaccatgagcggtgtgggtccccagccgcggcagagcttcctctggctgctcggcagacaacagacaccagggacagagacaaggttgaggatttggtctgcagcctctgagcggacacactcaccctcagtgcctgccaattcagccccaccacaggcgccagtcccgagcctgagcacaggggctgccacgacgctcgactctctgggccaagactcacacacagcctggacactgcccgggtgaagggctctgggggacagggggagcagctggtatgtgtgtgaccatgggtcccagactcagtgccatctgtctccccattaggagaggacgcctggtacctgcccaagcacccaagccatgggagttgctgcttgctctccacgcagctttgtcccagcagcacccccaactcctgtgatgggttgcagggggtgctcacctctgtggcacacacaaaggcccaggggcctgggggtgcaggcaggtgcactccaacccttgggcagcccagagaacaacctaatggaaagtgaagggaattgtacaagtgtgtacaagggtgcagggtggttcctgccttcttgcacgcacagtctcccacactcatacagccacaggttcgtacgaggtacacatatgtgggctcacctagcatgcctcccgtgtgcacagcagtgctcctttggcctcaggccacaggcatacatgtgcaactgtacgtgcactctaggaatccctaatgatcatggccatcgggtggctcgcagtgcactgagcaccatgctctgtccctggtgtcttcatgcctcagtccacttgatcccctcagcatcctcctggggaaggtgctacagctgccctgttttataggcagggaaactgaggttcagagaagcaaagtgacttgcccaaggtcacccggccaggaagcggcagaggcaggatctgaccccagacccgctgcggcacacacacgcctgcctgcacgctcccgtgaggaggtgctttgtgcccaaggccctgcagcagtgtggggggttctgaggccatctcccactggccacagcacagcaagctccagcagggcagctgccccaaggcctggcggtaaaacctcagcagcgagaaacacggtcgacttttgtccaagaactgaagcactaaagcaaagtcaaacacaatcgctccatgccctgccacgaaccgcgaccttaccacgtgctgtgacctattgccacttgtgcccagctccacacaggagccgggtctgacatccgattgctcagagcctggtatgaaacattctaggtaccgccctgagagtggcttagtaactgctggttcctcaggacagacaggaggaaggccaaggtgacctttgccctgcgaccctacagagggccctggggaggccctgcctggtctttagacactgcccaacaaggatgctagaaggggcagtgagttttctgcctcctggggaactgcagcccaggcagagaacaggacccccaccctgggagcagcgggtgtgcccggcctctcccgcctgtccctggccagtctgccatccacgaggccagggcctttggcggtcctaggcggggatcaaggccgggcaggttctgcaaaaatttcccttgaaagactctttttcaagattttcttttgaaaacaaattcataaccacatcaaacaggaatccccgttgccttgggtttgatcgccggccgcccggggctctctaactagctgttattctaattgcttttttctcttccgagggctgcataggtctcttatggttattaatttggtgagtgcaggccgggcacaaagcagcttttgtctgccttgccttttaatcactatcaaattgcaaataatggtggaggctgagatccccaaaattgatctgtcccagcagttcttggggaaccggccccagtgcctagagcatgcactgccttcccccagggcggcagctccccgatggcacctgcccggatgcacctccgcatgggtggggtctggcctcggccatgggaggtgcttctcaggctcctccatcgccaaaaaaaaccaaacgtgccagcgagatgaaggcgccctgcccgcagagtggtggggtgggactcttcagggacacgtgctgtgacaagtgcttgagtcagagctaagactctggggctgccgaggagccacctgtagcccaggcctgggcccttcccacaaggggggcagcagcatgatgcatcagactgtggacccgccctgggcatccagcccacatcctggcccacccccggggcctctgtcaccagcagctgggatgatgagagcatgtctctggggccagagaccctagccagtccctcaaagccccagttggcacaggcagcagttgaggtgagcctgggaccagccagagccaggcatgggctgacgctggcccaggcagcttcagggagcccttcagtgtccgtcggaggcaagctcggccctgtggctgcctcccgaccccaaaggtggctgagtgcctctctacacggtgccgggactccctgccgggaggagctgtcaccaaagtggctcaggactgagcgctgattccagccacaccctcagcctgcactgcctgcctgcggccctgacacccactgtctctttctgtcccaagaatcccctgtgaaggcctccacacccattagcacatgtgggacttggacagatgttcgagtgccataatgtgaaaatttatgaaaccacaaatgttcatctgtgatgtatttggtgctttaattaatgccaaaccaattgatacccaagctggggcctgcacagttagtgacagtaagccacgcggggcaaacctcgttccacactaccagtatgcggggcccagggagctgaggtgagccctaggacacaagcccaggctttgccctcaaagacccacgctggctgcacctttgatctgctacgctctcgtaggtctctgggcctcagtttcctcatgtgcaccctgaaggctgagagacctcccatgacccctaccaggcatgagcaggtcgtgggactgagagggctggtcctgccggcagcaggagccacgggggtcagggtgtggctgaacaagaacgagacctcaggccggtccccctcccagaggccccgccccaccctgccctctgctttcgccggctccctacctgacacactgtgtccccccatatggcagctccgtggtctcgagatggagccttggggtgggagctgtggggacaggatgggagacatggcactttcagccagtgactctgaccctcttttcctgggcctcagtgtctgcatctgtgggatggagtgtgggcctctgtggctcgtccccaagtggctttgcagagcactgaagtgctggcgggtccttgggtgtgagagaccccggtggatggccctgggcccctgcccctgccaaaccacagaagtcctgcacccctttcctccatagtctgggcctcacatcaggtttatctgggaaaaataaaacatggggctccctctggcctggaccgtcagacctcggatgtacacctgcccttgtgttcaggacagttgggtctcagactcaccccatacctgcaaggcagaaccacaggggagccagggagcctccacactgcagcccccaccacccagggctggaagtgggtcccctgggctcctgctctgggcagggcacagtcccaccctcccaggtggaggctgcccacctagccctctagacagacgctcggccccactcaggcaggcgcccccctctcatctcagcctctcacagcaccctgttggccgcctcttccttagcctgctcagcctccgtggtaggtgctgtgggtgacgaccacagcacccagcctttgaagctggcccgggtccacccagaccctagcaaactggttgctccctctctggccatcccggggcttgtgcccacgtcacccagcagcatcttccctggggttgtctcacccgcacagaacccagccctggcccacacctcaccccaagcctatccggctggatcagcagtggggccgggcgcatgagggaccaggcccgcccggcgcagcctagggtgcagacccctggagtgcacggccaggtggaccgggccagctcccgcctgctgcctgtgcttagggccagtggttgacgttgctgtggctgagtcatcttcgtgcctctctctggagccatacgtttccctgaagcagctctgctgttcagcccttatcgcgtgctgatctgtttgcccctcccccaccacttctaggtctttccaggcctccaggtacccacggtgggggagggtctacttcattctccacagagcacgctgaggggctctcctgcaagaacaccgcaggctgaaggaccagccctgtctcctgtggccaccaacagagctgtgcgccctccccgaaccctcactcatgctagggcccccaggtccaacctcctagggagaggggtccccaacctggactccctcacctgccctagtctgcccctggggttggccctgctccacccagcacctgctctgagggtgccagggtgccggcctgccggccagggccttccagtctccccatcaaggctggatggccacttcccacccggggcgggctccagcctcattccccagcggtgctgtccttccaaggagctctcagatcacctggctgtccactcgtttggggcttctctgctgcctccgcagcactgcgaggcctctgatcacctactctctgtgctgggtgcatttcgggttctgtcctgccttgacctccctgccagctttgcagggcagccaccctggcacatagctcactgcagaaccagcccctgagaaggtggaggccacatggctagccagagggcacgctctagggcactgctctgaccacagaatgtgggtgcagatggtgtctgggaaaatagtggtgtccccgctaggttaaagacatggcataatggttcctgggggatgacaaaaaaacccacccccacccccttgcagaaagcatcacagaggcacaagccctgtgccctgcaagcccctcctggaagtggcccagcaggggcatcccctgcacacccaggcaaagcccaagccctctgcctcctcaaccaccccaggccctgcccatgagccagccttgctgaactctgccctctgtccagttctcctccagacacagtagacatagcccccagcctttcttgacccttaacccaaatgtccccaagcctggcctcaagaagccaaaggctgccgcaaacccaaatatttcaggtccgggtccctggtgcagaccctgccatgcggggatgtggcacagaaggccggccagcctggggagcagagaaggaggagaggagagctcctggccctgagcctgaatgcctgtggacacatatagggactcccagcacgcacgggatggactccaatcggcacacatgcacattccttgcacacacacaggcgcgaccgagggccttgcagacatagggtgcacacgtgcgtgccgcctgcatacagcatgcacttgcagagacggttggcaccttcccttctctggccccaaacctgggccctgaggctgtctgcacacctgggtgcttcccaccactgactctctcgtctgcctttgtccccgcaggtgacgcagctggaccagaggctggcactcatcaccgacatgcttcaccagctgctctccttgcacggtggcagcacccccggcagcggcggcccccccagagagggcggggcccacatcacccagccctgcggcagtggcggctccgtcgaccctgagctcttcctgcccagcaacaccctgcccacctacgagcagctgaccgtgcccaggaggggccccgatgaggggtcctgaggaggggatggggctgggggatgggcctgagtgagaggggaggccaagagtggccccacctggccctctctgaaggaggccacctcctaaaaggcccagagagaagagccccactctcagaggccccaataccccatggaccatgctgtctggcacagcctgcacttgggggctcagcaaggccacctcttcctggccggtgtgggggccccgtctcaggtctgagttgttaccccaagcgccctggcccccacatggtgatgttgacatcactggcatggtggttgggacccagtggcagggcacagggcctggcccatgtatggccaggaagtagcacaggctgagtgcaggcccaccctgcttggcccagggggcttcctgaggggagacagagcaacccctggaccccagcctcaaatccaggaccctgccaggcacaggcagggcaggaccagcccacgctgactacagggccgccggcaataaaagcccaggagcccatttggagggcctgggcctggctccctcactctcaggaaatgctgacccatgggcaggagactgtggagactgctcctgagcccccagcttccagcaggagggacagtctcaccatttccccagggcacgtggttgagtggggggaacgcccacttccctgggttagactgccagctcttcctagctggagaggagccctgcctctccgcccctgagcccactgtgcgtggggctcccgcctccaacccctcgcccagtcccagcagccagccaaacacacagaaggggactgccacctccccttgccagctgctgagccgcagagaagtgacggttcctacacaggacaggggttccttctgggcattacatcgcatagaaatcaataatttgtggtgatttggatctgtgttttaatgagtttcacagtgtgattttgattattaattgtgcaagcttttcctaataaacgtggagaatcacaggctgggctgggcactgctctcaccttggttcctggggcatccatggggtctctcacagacaggacccctgcagttcccctggaagcagtgcccaggtggctgtggaataggaacgctatgtccgtgtactgaggagtaggtcagggttcagaggggctgcaagatgccatcgaaggctctagcttagcgacgtcgctcctgttctgggccctgggctggccctggccatgaagtgcagtcacagtgtggtcactgcctgtcttccagcagactctatgcccttgcggcagatgggctctgtctgggcctctctgtctgcccctcccaggccagggtggcccttcatcaaggacccacatgctccactctgggagcaggccccacccaggcccattccccaggatgccaagggctaaactctggaggggttgtggtgcaaggaaggcctggggcccctgaggctcccatatgctcacccctggcctcctccgggcctctatttccccattggtaacacgatgctcccttagcctgtccagttctctgagtgggacagaggggccaccaccctgctcgccctgaccctgttcctgcagctttctgtgaggcccgcctctcctaaggtggaaagagtgcctcactctcggcacagacacactcaaccggggcaggtgcatctgctgtgcccccacctcagctattggaccgtttctcagtccttcaggactgcagccgccttctgtcctctttccagagcccatcccgaagtctcaggatatgagggcttggggcatctgagatatcaaggatggggctgtcctgagtccactgggggcaggaggcggccagcagcaggtggcagggacaggggccccaggtttctgtgtggagtaggggtggaagcccttgttagagggaaaggccctgggtcccacctggtgccaagcccactgggcccgtgcccccaacccatgggtcttggcatctggcctggccagcactgaccgggatggacgaggtggaggggcagcacggggcttcccaggcttccctggcctgcacccctccgggaggagcgggagcagcagttactgaaaggcaggaactgttgtttccttgttgggtaaatatttgtggaaacccggggatgccggccggaaagcagggccctccacagcgcccaggccccccagccccggccgcccaccccgggaccctggcccacagggagctccgtggggccgcccatctgggccgggcgcggccccggcacccagcccgccttgttgtccatattatggactgcgcacaaagtgcccgaggactcctctcctggacgggccattgcagccctctcgggtgtgaaatgcaatttacctgaaataaagcccaattatggaattagctaattaaagccatggcggaggctgggcctggccggccgagtgctcaatgcccgccggtgcccgtggactgagggaacagatggcgcctcggcccgccgtgccggccgcattccttcactctgtcccccgataagtgacctagacagcacacgaccatctggtgtgtggcacgtcctgcgggccccggacaatggcccggcagacctctctgc

SEQ ID NO: 300 - DNA, 15511 bp, Homo sapiens
  source 1..15511: mol_type = genomic DNA
ataagacattttcaaccgttgatgaattgtaaattggtaaaacttttatggagagaaatgtagcactactaatcaaaattacaaatgtgcaatctttgacctagtaatctcacctctaagaatttatcctttatatatcttgaacatgtgtaaagtgatgtacatataaggtatttgttgcataattgtccataaaagcaaaggtagaaacattctgaatgtctgtcattaggaaagtgctcagtggctatttttaaaataaggtagatatttgtgttcaaatatgaaaacatcttttatatggccaactggaaaaggcaaagtatatagcattctatgatttctattaataatgaagaggtactgagatgatggataaaggtaggtatatttttgcttgtatatgtttagaatatttctggaaggatagccaaaaggtagtaatagtggttgcttccttgaggtacacctgatgtcttgaaattatgggtgggaaagacataaactttctactgtaatatgtctttttacctttacaattttttatcatgaatgtgtattagctatgcaaaataaattgaatagaaaaaccaattccctgctcaaagcaaatccctcctgcttctctcctccccagtatttattgcatcttttgttatccttgcatgtttatatccccaacaaaaccaagagttctttgactgctacaactgtgtctccatcgtgtttgcatatccagcatttgcacattgccttaatcatgaaaagggttttttttttttttttaaagtgatgttttgaaggatgaagaagaccctttttttttgggtggaagtcaggctccctttaaatatggcctaatattgctgagcagggttgtgaggccctaaaaacgtcttcctaccattcctggaattctaccttgaaacatgtctctatcctttaagagaaagggaggagataaaaaggagagagagaagctgaagctgactcaaagatccgactggacctgaacagtgccccagggagaatccatttgaaaaaaaaaaaaaaatgtgatcatgtgaatggacaagaaggagatggctttagatcttatatgctctaaacgaagagttacgctgagagggaaactgacttgtcatgaagtcagctttgttccgttgctatgtgtcatccctgctaatggtgagtttacctagggcagaggctaccatctcaaccatgaagctgaagacacaggcatccgtattctatagctaattcagttgatttcatctcagcacacatacactgagcgcttcctaagagcgaggttgaccgacatttttattagcaataatctctgccttcttctgattacctagagatttaagaccacataatcatcctctacctcacagggtcaagggagtgggggaggaaatgggctaagaggttctaaatccctcctaacacttgcttcttccaaatcagcaagattagagcagtcaacagctgactgcgttcagaccctgcaggctgggctggcctgcccaggacctgagaaggggcagctccggtggcaatgtctgagcccctagctgtgctggtccgggctggcctctctaagacagtgcaggccacgtgatccatcctcctagaggcagtgagcaggtgagggacccctaccacagccaggaggaaaaagctaggcgtccactttccgcagccatgctcaaacagagtgagaggagacggtcctggagctacaggccctggaacacgacggagaatgagggcagccaacaccgcaggagcatttgctccctgggtgcccgttccggctcccaggccagcatccacggctggacagagggcaactataactactacatcgaggaagacgaagacggcgaggaggaggaccagtggaaggacgacctggcagaagaggaccagcaggcaggggaggtcaccaccgccaagcccgagggccccagcgaccctccggccctgctgtccacgctgaatgtgaacgtgggtggccacagctaccagctggactactgcgagctggccggcttccccaagacgcgcctaggtcgcctggccacctccaccagccgcagccgccagctaagcctgtgcgacgactacgaggagcagacagacgaatacttcttcgaccgcgacccggccgtcttccagctggtctacaatttctacctgtccggggtgctgctggtgctcgacgggctgtgtccgcgccgcttcctggaggagctgggctactggggcgtgcggctcaagtacacgccacgctgctgccgcatctgcttcgaggagcggcgcgacgagctgagcgaacggctcaagatccagcacgagctgcgcgcgcaggcgcaggtcgaggaggcggaggaactcttccgcgacatgcgcttctacggcccgcagcggcgccgcctctggaacctcatggagaagccattctcctcggtggccgccaaggccatcggggtggcctccagcaccttcgtgctcgtctccgtggtggcgctggcgctcaacaccgtggaggagatgcagcagcactcggggcagggcgagggcggcccagacctgcggcccatcctggagcacgtggagatgctgtgcatgggcttcttcacgctcgagtacctgctgcgcctagcctccacgcccgacctgaggcgcttcgcgcgcagcgccctcaacctggtggacctggtggccatcctgccgctctaccttcagctgctgctcgagtgcttcacgggcgagggccaccaacgcggccagacggtgggcagcgtgggtaaggtgggtcaggtgttgcgcgtcatgcgcctcatgcgcatcttccgcatcctcaagctggcgcgccactccaccggactgcgtgccttcggcttcacgctgcgccagtgctaccagcaggtgggctgcctgctgctcttcatcgccatgggcatcttcactttctctgcggctgtctactctgtggagcacgatgtgcccagcaccaacttcactaccatcccccactcctggtggtgggccgcggtgagtacctttgccctgggctttcccatcctcttccccagcccagtgagctgctcctccctcccctggttatcagccaccaggctttggcttctgatcctcgtcttcccccccacccccaatcgccgcatacagctaacaaaacggcgatggatgtcaaaagtggtggaaagagaactcagcagatcagtaagtaagtgaatttgacttagtcgtagaaatctccaaatctagatttcgtcttcaaacctttaaaagacaggttttaaagaagatgcgtcatcattactgttatttaccagttattgagcatccagtgtcctgacaaagcttatctcattgtggcatcacagcctttgagatggttatgaccaccatttttttttaaggggacaagcagaaatggcttcagtttttgaaagaaactgtagatttatacagagaaggaggtgagacttggctgaaccatgttgactctaactgaaatcccaccacctctggttccacttaaatctgagtgtggaaagaagcatctcaaactgaaacttgctctgacttcactaaagttctttcaggaccctgtattattgccccattttacagatagtgaaattgaagtacagagagtttgaatgtggactcacagctagaggtggcaaagccagaactgaaactcagtcctgtccatctccaaactccatgcctttcccacacccaagcacagtctctttcaagttttagttcttttgcatgcattgctgaatttgtacagttagtgtaacagttattttttgtcattgttttctttggcctttgcctttttataacttgtgctgtttactcaaatatctgtattttgagctgtggtagctgaatccctggaaataaatgttaatcaggtcttctcagatcgatgaataagtcggcatatatgaaggaaagaattgaatgtatggtttccttagttttcttttgaaaagtagattgtaatacctttaaagacattaagcaaatataactagttttcccatgtcagaaagtagatattttcaacattgtgtatgtcataacccatagtctggtgtgcacttctgagacaaaccaacccaaggccactgacagtgcaatgcagcataatagaagatttagaaaacctgattctagtcccagacctgtcaataattaaccatgaccctgaataattaactgtgaaaccttaatccctcacttccagtcctgctttctcacctctaaaaggggaggctggacatgtaaaagtctgcagttcagtgagtcttccttcccttgaaagcagggagctcatatgtatagaggatatgtgagctttcttcagtggcaggatgatacgatgttcttctgaatgagctaggcaaattctgcttctctgatcatattccaagtgatgaaaggtcatccctatagtagataaaccatgtgtacagatgaggctcatggttgatgatttgtccccagcaaatgacatttactttggggtgactaaagcaggaaagcagaagagtaaatccacatgctgatgatatgatacaacacttgagagtcaaatttctattcatctaaacatctttaaaggctagtgcatgaaggcactggagctagtacactctctgatactacagtttgaacccacaaaagttttttcgaccttttgtatattaacaaatactttgataaaagttatgttactttcaaacggatatggctagagaaaaaattttaattaaaataaaacacataaagaataatgttactcaggttgtatttttaccagtaaatttttttgaactgaatacccattgatctcacttaaatttctgatctgttcaatgtacaatgaagtctaaacctttcaaattatctctttttatgttaactggcactatgtaactcaaaatcaatgtttttcataaattttacaaaaattgaatcaccagtttttgccaatcataaatgttaccaattattgctcttatctgtatgaatttccttttgaagccattatctctatcagccactattttcataggcccaattttgcacattccaaccatcccatttacaaaccttaccctttatcaatggtctttgtccattttattctgaaaattatttataccagtaaaattcgttacaaattagataaaagactgatcatctgtatttatttctaaactaatctatgaaaacaatgggagcaattgcccttgaatattctaagaccgctctgttccccaggactgctatgttattaatccagttcttctctgtacttctaactacactccataatacagactaaaggttcatattctcaatagagcaaagagaaaagaacacattgaattgatgtggacaaaatgtcttgtttccggtatgtagatgcaaagtgaaaagaaacaaaacattaggaccaatttgtcatataacccacaaaaattcaccttattcattcattgaacagtaagtttttgagcacctccaatgtgcccagtagtattcttaacactagggatacagggtaggagaagaaaaaacaatcaagttttttctcttctggagcttacattctaatggagaaagacagataataaataatttcaggtattggcatagcttgtgtgggataacaagattgagagtgattcaggcagtagagtctgtctttagtgggatagtcagagaagcccttttggagaagatgacattgagataaagtttgaaagatgaaaagagactcatctaaatgcacctgactcaacagatatgacaatctgagaagaggattcctaaaagtaactgatctagtggtttctaagcattttattaatcatgcatcttatttttaaaaatttggggcacatacccatgataaatgtgtatttatttataaataaattagaagttatttatttataaataaattagaagttatttataaataaattagaagttatttataaataaattagaagttatttataaataaattagaagttatttataaataaattagaagttatttataaataaattagaagttatttataaataaaatagaagttatttatttataaataaattagaagttatttatttataaataaattagaagttatttatttacaaattagaagttatttatttacaaattagaagttatttataaattagaagttatttataaataaattagaagttatttataaataaattagaagttatttataaataaattagaagttatttataaataaattagaagttatttataaataagttatttataaatagaagttatttataaataagttatttataaatagaagttatttataaataagttatttataaatagaagttatttataaataagttatttataaataaaagttatttataaataaattagaagttatttataaataaattagaagttatttatttataaattagaagttatttatttataaataaattagaagttatttatttataaataaattagaagttctttattgccataataacgatacatcaccaaccaccctgaaattcaatggcttaaaacatcaagcgtttatttagctcatgaatttaaaagtcagcgtatactctgatttcagctagaaggttcttctctttcatgaggctcttgttactcattcacatgcctgatggtcaactggcatgaagggagagactaggccacatgtctgcattcctctggcagactccagcagccacatgtcgatggctgtggcaaagaacaagagagagaatgcaagccccatcatgcaaacacttcataagtttcttttcatggcatttgctcagcccattggccagagtaagtcacatggccaagctgcaagtcaaagggcagggcaggttagcccacccaccataggagggcactgcaaagttatatggcaaacagcttagacacagaaagatgtaaagaattagttccaataatgcaatctttctcctgcagtaatatattactgctcaaatatattacacatatcagaaagtatacactcacaaattgaaactttaaagatgagataaagaaaaatataattggcattttatttcaccattctggggctgtatcctttgtgaaatatgcatcccacattacagagagtttctcttatccattcttttatgtatttttaatactttcagacaacaccaaatctgacttgcttttaataatctttcttctctctatgccaaggatcctgcaaactttctctgtaattcaactcaaggatttaagaaaaatacagtagttttcattactgtgaattctcctgcagctgcaaaacaaatccctcctggacacttatgtctacaaatgctcatgtattaggatgtaggatagacctgtctttttcatctgtcaaatggaggttatttgtgagcactaatgtaataggaaacatatgtaaactgctagcctatagtaagtctgcaataaatagaagctaccataactgactagttgatagtctttgtcacatggaagcaataacctttgcttctacattcatttgggaagaaaataaaacagaaatgattctttttctactgaggaaaagaaagaacctataaaacatacgagaaggtcagctgttccctcatgggagaacttctgagagtccagataaacaggcccacgcctaaagcagctccagccatcttggggctctctggattgcctgggggtaggaaatgcacggcacagctaaacaagaacaatgggctctatgatgaagctgtaatcattggcctcctgtgtgggtatggtttttttcttttactttttttttttttttagcctcaacatatgaccacatttttttttcttattttttttttgccgggggttggggggtggagggcatgggtatgttttcaagtagaaaagagtaagtagactttgaatgaaccatttccttctgagttttccagggcaagttaaagctgtagaaaccaaacaggaaactacggcatgaactcactccttcaaaaactaacttctcaaaaagaaaatttatctctagttgaggcaccattttgtcccagagaccttgctcccatctttctttccctaaggtatgttttcattaccttgccaataggtggcacttacaagatcactgaaattattttatttttgttcattgattgctttgaggaaacccatttgaaaaataaattaggttgcagtcaggaaaatagataccaaggtgaatatttcaaacagggaatttaatacaaggaaatagatagttgttagaagactagaagaagaaaaaaaagaagactggaaaagcagaaagagaaaactgagataatccagagattggtaattgcagggagtagctattggccctagaattgggagaataaatgggaaaaggtgttgccaccagaagctaagagtccacaggaggggcctctgtgtagctgttgcaaggactcctaaattggcaccatgaggctgatgccaggaatgccaaaaaatgcctgaaccatagctattggctgcaattggaggaatgaaggcagaaaccagaggcaggattagagacccttatgtcctcataccatcttccagtctctcataggcagaacataactagaagacagtgggcaagagaatctgggaaatgtagtttgcagactcccagttctggaattataaaataaaatacagaagggtgtcaggcttgggactaagagacaacatataaatatctggcacagaaagtaatagagttctacctccttcagaagtagcacaggagctatagacggggtaaaggctcttaggcattgttactactttttatcttatggattcccaattttggagtggtctccttttatgtctttaaagtatgttcctcattttagccaatatgatgtgagtggaacatgacagcatcattgagggcacggagaaatgcagggaagctgagggtgtggacagcatcattattgcgcacctttctgtggatagattaatagatctcaaacttacatttgtggctttgctttagctgtgcacacctaccgcttattgtaccacttacaaacatgtcagaactgtaatatacagatgagggttgttattatcctgaaggtagtcacccatgacctcattctaacagtgattccactaatcaagacattctttgaattccactgaggaattaccttcagagtttgtgacacatccacttgtttctaggttgttaaatctttgtctttttaaggctacattcagtattttaaaatagttaagacactttagtttaagatcgacacttagagtaaaccatcaaggtggatatgaccgcttgctgctactgaatctactgtgcagactataattcaaaagaggaattccaaatatacttgttgcaataatagcatgagtaagtacagcctttgaagctggatcctttgaaggacaacacgtattgaggcttataataattttatccaaaaaagatccatcttcaccacctctaattcctttggaaaacagaaagagtgttattttgaaaaataagttttattccctaggatcataaattcctgaatgcatggactactgggtgccaagattgattccattccttgttcattatgagggaaacaaacttgtcttgttaaatgagaaatccaagtattctcaagttttggagaaaaatttgatgcttatcctcataatatatggcaggccaggatttgttgtttagtgagtaaactgccaggggaaggtcacattctggctttgggacccaaggctaaggaaagtatgtacgtttacagcagaatggttaagcttccagtttgcagagttgctgagctagccagttttcttcagtatattaagatggattgcggaaattttggtcacatttccaaacccaactcctgctaatgtgacaactcattctgtgaggtcacttgggtcagtctggggccttcagcttttaattcccatctagggagaaatggcttggcctatggaatgtggaaaaaaagttccccaaagccaaggaatcctgagttcctcctggagccaaggaacaagaaacagatcacttgttgagtcaaattattcacgaaatagacaacatataaattaactgtacattttcaacaaattattggggaccagtcacacatagcctcctagcagaagagatctgttctctaaaaatagagattgaagatatacaaaaatatttggatcatattatacacatcagatatttattcttctttaagccaattctctttgcttttgacttttcactcaaagttcagccaaaaaaaaaagaagtttggcttaagggtgaagcaaagccagtgtgcagaatgatcaaaagttgaaaataagcagtttatcttaattattttcttcctcagtgtcttcctactctctcccatccccgccatcctgaacccttaagtgacttgtttcctccaaggcctctgcattggacttccgtggatgtctcatgttctaaaccaggggtccccaatcccgggctgtggagtggtacttgtctgtggcctgttaggaacccggccacacagcaggagatgagtggagggccatcaatcattaccgcctaagttctgcctcctgtcagatcaaccacagcgttagattctcataggagtgggaaccctattgttaactgcgcatgggagggatctaggttgcttgctccttatgagaatctaactaatacctgacaacctgagatggagcagtttcatcccgaaaccatcccctcccccaaccccgtccatgggaaaaatggtcgtccacaaaaccggtccctggtgccaaagaggttggggaccgctgttctaaactaccccttcctgtcactcactcctaaatccaaactccctttaggcctcctccagggaaggttgactaaactttcatccagaggtgtgagtcatggtgttagtgacaaatgaaagctattgttcagctcacacaactggagagagatcagcctggggttctttgacttttggtgtggtcaatgacaagaaacacacacccggacacaggaaggggaacatcacacaccagggcctgttgtggggtgggggaggggggaggggtagcatttggagatatacctaacgttaaatgacaagttactgggtgcagcacaccaacatggcacatgtatacatatgtaactaacctgcacgttgtgcacatgtaccctagaacttaaataaaaaaaagacacacccactcatgcaaccaagaggactttgagattaacccacaatctcactttatcactgcctcacatcaccccttggtccagaagttgggagaaggatattctctactggagccagagggcagagtcagggaggagcttgtttccacagcctgagggtctgataagcataacgtatatagagttgctggtgtagaatgcactcaataaatgttggtctttgcctcttctcagtggaggccagcttcagcatgggggaccctgggattgcatacatgatatatatataataatattattgcttacacaccctgtgccaggcactccttcaattcctataacaactctgtgaggtagataccacacatttcaaaagtagaaactgaggccaagagaatttaggtgatctgcccaacttattcagctgggaagtggattcagacccacaagtctactgtagtccgtttccttcagcttatctacaccacattacctctcttggatgcctgcttgtattttgactctgcagaaaaaggctgcatgacctctcacaagagacagggcagtgagtgacaggaggtgcatcatcagcctcaaaaaggaggcatacccttccttttttcgtgggctggatggagctgtggttctcatcagtgccctcagttttgtgcagctggctcacttctccatttcattctaatcagtcaactgcactattccaggttcaaactaacccttacatcatcaaaacaaaaatatttacactgctaagctaacggccacctcagcacggatcaacaagatgaccatatgctttactgccgtctgctggaaaattatggcaacaactacccaaatacacaaagcaaagagtgcccccctggagtagtgcaacgcaaaaatgtttacaactgtgaccaacagctctgcttaaaaggcttctagtaatttagccaatactctggggatcagagggagtacatgaggcataaaaaacagtccccaaggaattttcacagggttttctctggtaactgataactagtcccatggtatctgcattttaaaacagaagcttgttaacctaaataagtctccaattagtgggatttaaatcagtatgacaagagtaatgggaagtatttcatgcaggggtgaacatatttttggtgagtgatgtcttacaaaagtccctttacaaaataatgagagtgtttctccagacatctgcaattaaagcaccttcacataaagtctctcatttgaactacgtaacaactttgaaaagtgttataactgtcttcattttaaagatgagaggaagacaatggaggagtttcatgccttttgtatgcctggtactgtgttcagtgctttatattcattttcttatttagccttcacaagaatcctaagagttagatggttttctcctgttttaaataaaaaaaaaaaaaaagaaaaaaagaaaaagagagagagagagtctgaaggttttgccccaggtcactcaactggaaaggttcagagtcaggacttgaacccaggtctgactgttctaagcccaagatttttccaatacatacagtgtacaggcaaacccagggacctgctttcctgaatctggtgccagctgagttagggaggcaaagatcatttactgagcacgttctacatcaggtacttaacatactattttaaatgctctttacagcaaccatttcaagtaggtattacctcctcctcccatatcttacattcaaacatgcatgagtcgtagtcaggatttcagccaaagtctttcagctccatccatagcttctgttcttttcatgacacaggtcctagagggagtcttcctggtacctcctaaagcaggctccgtgggaagccattacacttcccatgtgtacccacagggaggacgcttccctgcttgctcctctccctttcttctcctccccgatcttagtgctaacaattccatcctgctttccttcctctacaggtgagcatctccaccgtgggctacggagacatgtacccagagacccacctgggcaggttttttgccttcctctgcattgcttttgggatcattctcaacgggatgcccatttccatcctctacaacaagttttctgattactacagcaagctgaaggcttatgagtataccaccatacgcagggagaggggagaggtgaacttcatgcagagagccagaaagaagatagctgagtgtttgcttggaagcaacccacagctcaccccaagacaagagaattagtattttataggacatgtggctggtagattccatgaacttcaaggcttcattgctctttttttaatcattatgattggcagcaaaaggaaatgtgaagcagacatacacaaaggccatttcgttcacaaagtactgcctctagaaatactcattttggcccaaactcagaatgtctcatagttgctctgtgttgtgtgaaacatctgaccttctcaatgacgttgatattgaaaacctgaggggagcaacagcttagatttttcttgtagcttctcgtggcatctagctcaataaatatttttggacttgagttgacttgagaaaattttttttactttaaatttttctaaaattcttaactttccagagggagggagggttacagcagaaattatacaagctttggagttagaccaaccttagtcagaatcccagagctaccagctgtatgcttttaggcaagcgactctaaccctttaagcctcagtttcttcaactgtgaaatgtaggcaatacttaccctgccaggctgagcaatatagtgagaccctgcctctacaaaaacttattaagaattatctgggtgtgctggcccacacctgtagtcccagctacttggaagactgaggtgagatcacttgagcccaggagtttgaggttagagtaagctataaccacattactgcactccaatctagatggcagagtaagaccctgcctcaaataaataaataaataaataaataaataaaaccacctgccttgtaaaatgagtctggggataacagatatgtgtaaacgctcaataaatgataggtattaaaattgtttaagtggatgttatctagtgaaatctctagaccagtggttctcaaaggcaaattcattcctcagaggccagctaatgcctagagatggttttgattgccaataccgtgaggggcaataagggagacttctggcatctaggagctaggggccgaggatgttgctaaacatcctacaaggcaaaggacagcccccataacaaagaattatctgacccaaaatgtcaatagtgccaaactggagaaactcttgtctagatttaatatgggagcccccagattggacttgtgaaacatgcctaaatgtactaatcctcccccattagaaggagcccccatactgtccttactgactcaggcctcctttttctcttttccacaaaaggaagaaaaaaaaatagcccacctcctgaacaattgctgtgggcaaaagtaattaaatcagtgtggccctccactctcactgttggtggattagagaaccagtgcccacaggaaatgggtcctttctctccctgtaaccttttcctcttcatttctttgtccttccttgggactattggaaatggaagtgttgagaattaaagactcctttgaactgagcacacaaagattgccctgtaactggagcttgccaatgcagaccctcaaatttgtctcggggcatggctggacctatacttgtgtcataagaataaactgctgattcaagcaacagagagagaaaaaaataagaatagttgcctacaatgagaggcaatttggactgtatatgtagcatataactttaatatttaatacatccctaaataaggtattggattactttttaatttaggaagaaatggaagcttggagaagttaagtaattccactacgttcacacagccagtaaacagtgggactggggttcaagcccaggtctgtctgatccccagggctcttgatggagggctaaacttgtatcatcagcatcacctgga

SEQ ID NO: 301 - DNA, 187484 bp, Homo sapiens
  source 1..187484: mol_type = genomic DNA
tgggattacaggcatgcgccaccatgcctggctaattttgtatttgttaatagagacaggtttttgccatgttggccaggctggtctcgaactctggacctcaggtgttccacccgactcgacctcccaaagtgctgggattacaggtgtgagtcgcccgagccacagcaccgggcctggcctccttttcaattgctacatagtaagtattccagagtactgattgctattaagttacttctctaatcccccactgatggatagttagtgcaaaacattggaaacagttgcagacagccctgccgccggcattcttgaattgtgtaagctccagaccttttttctgggtacatcacctccaggaagaactgctggctgggttatcgggtggtggatgcacttagaatgttattagaaaatgtcaaattgcccaatttacactcctgccactccaaatgggggcatgcctcacacccctgcgtggtccagtacacaatgaatgctcattttgtgaagtcacagggtcaaatctttctccgtgcctcatcccacttaatccttgcaacattctcaagaggcgggtagacggggtgtggccactaccatcatatccattgcacagttggaaacagactcagcgaggttactttgctggaggtcaaccacagtgaggcatggggcccggcttagctttgaatccaggtcagaaagcaccaaagctcattctctcccatacattttagggaactcggggagagggaccctaactattccgaaggccttgccccttggcaaaggtttgttgattgtgatgggaatagacctacggtggcggggtggaggctcttgctgctttaccctatgttctcggttctcctcctttgcaaaacggatcgctatgtctccttgcttggcactttgcaaattggggaacgctaagcccacattccggccacgggtttcgaacctccagcctgcacgttcccggccggtgctgatgctgtgctgggtctcacgtactcagccgccgcctgataaccagggcggggcccggagcttgcgggcagtgattggcacctgccccagcctgtccgcgcctcgggctggcccctcaagccaatactggctcctctctgtgcggtcgtcgggcgggccctgaggctcccttgtcaatccaaggcccagctgccgtcgggttggtcgcggcagccttggctggcgtgcgccccctccaatgagaacagagccggtcagcgggcacgtgggtgggcgccggcgtgtccccgccggtctgccaatgaagaggcgaggccggcgtttgtccccgcccaatcgcggcgcgcggtgggcgggccgtgcggtgttgatgggcccggcggaggggaggggcggagctgtcagctccggccaatgggcgctcgggcgtggatccggcagccaatggcagtcggggcggagctggcgcgcggccttataagcccccccgcgagcgcttgcggagggctcggtcgccagcaaccgagcggggcccggcccgagcggggcctgggggtgcgacgccgagggcgggggagagcgcgccgctgctcccggaccgggccgcgcacgccgcctcaggtgagcccacggggaggccgcccggccgtgtccgagcgcggaccccgccgccatggccgcccccgcgtcgcggctcggggctgcgggcgcgcccgggactcgaggcccaggcctcgggcgcggcctgctcgggccgggcctcgcgctttgtccgggccggcggggcggttggggcgttaaccgcccggcccgggggcgcccgctggttttcgggcgggggcggcggggccggacaatggcggggcgcgcccaggggcgggagcgggggccccttcccgggccgggggcgcgcgggggctgggcacagacggccccggcgccccgcacaaaagatgacagcgtgggtggccccggccgggcccttttatcacccgggacaagcctcggcctattattattattatttttgaaagaaagcaagaaaaaggaaaaagaccccagcccctgggtaacccccgcctgcgtttctggccctttgggcgccaggggggctaaggggaagccccccagctggacacccagggatgccccctaaatgcctatcattgctcctgcactgcccccacctccggtcaacctgctatgccttggtagcttccaaacttgcccccctgtacgtacccgaaacccccaccccgccataagcatatgcaatctggattttagaaaaaaatcatcttgctatgcaacggcagcctccacgagtctctccgtccctcccccttccagcctgatcgccatctcgaacgaagcccctgctctagagaaatgaattgaggagttgcttccgccgagaccccttttctgtgtcccccgtggacatccccctgggagctggggacggactcgctctgaaatctgcttgacctggggtctgccagggcccaggtctgcgctcagtggtggccatgacaatcaggcaggacgggggactctgtccacctgggcacggtggaaggttttaaggggcatgttttccgcccctgggggcagtggaggcatggactgcttttgggtgcatcccatctgtttgcttgggggaggatgcttctgttttaataatttaccagcaccctgtgaggaagtgttccccgagttgtgaaactagtgagaaggtggttcagctccgtggagcctagtgatcctgtcatatgtgaagagcgtctttttccatgtgtttctggctggggcgtgtattcagcaagttcctttgggtcccaccgggtgcctgcactgtcttgggatctctggatactggactgaattcaagggatcggtgccctgccccagtcctctgcctcaatggccatttatcagaatgtccccgggctggagaatgctcctaaaaacagcaccagtcctaaagcaggctcattagacgactcctatgggcttttatcactgccgttatgggagctaatgactcccctaattctccaataatagcttccttatgagccaccaggagggtttgtcaacacacggggtcagccttctcctgcagcccctgctgaagcagtgggcatcctctctccgctttgcagtttatgttttgaaaccctgaaggtcggagcgtaaagccgtggtagagtcaacttctgtctgagccgaggatttctgggacttgccagcctcgtctccgtgtgtctgattggacacctggcaggtccgggcgctccccctccttgagccggcgacaccaggacgggtcagactgtcctggcctagaggaggtcaccgctggggaggaaaagggggtaacggagattctgccgcacagacgggtgtctgtgtacaggctgttttggtggaagcgtctactgtgtcaggagctgcgggtgcctgcgtgtgcacgtgtgtgtttagttgctgagacctgaaatatatatgtcttagtaacaatccgtttgctcgcattttctaaccctttcctctttggggagggggctgctaacaagatgttaactgctggcgcttaaaggtatagctgatcagccaccgcacagcaccccgcctggcctttgttgtacttttctgtctcgtggaagagacccttcctcagcctcctgccctgtcttcagtccctgtcccgtcctgcaggagccctctggggtggccaggggccgtcctctgtgtccttctctcccacctgaccactctgcctgtactttaattcctaatttctctgtctcctctgctggtttcctgcccgtttgtcctatgccccacccactccctgatgagccggggaggagcctcagctctggggaagccatctgtcctcggttccatctgacacctgtggggacgtgccttggggtcatgcgttcacctggtctggggctgctaggtttccagtgccgagtgccatgccgggacaggttgggaggagtccctggctcctgtgggtttagagtgtagtgggggaaagggtgagctggctgcccagggcctggtcacagctggaatggtggtgtgcagtccgctgccctcgggcccagctcagggagcaggcaggaggaggcgaggctgttgagggcctgaggtgcatttgtaggtggctttgttccctggatcggggagcggaattgggggttcagagctgggtgaccttgacccagtcacttgctcagtgacaaagcagatcgggggcactaaatctttcggagcccactgggcaggaggggacggagagcagatgaacagggtgggggctcggggcggggggagctccgcaggcctgcactggtcaccgccatgacagatcggccgtcctcatccacagcctcaccctaggctcctggctcagctccagggacctgccatgaggcagctcgatggggtcttcagatgccacagccctcccccttcctgccccaggggtctctgttcctggcttaggatgccggacagaagagcaggggcccagcctgggctccgttctcatctggtggtcttgacgacgtctctggatctctgccctctgtcccatgccccacacaggcttcagagttggagagacctggattcagatccctcctctgaggcagtcacttcccctctctgggccttgctttcttctctgtaaaatgggtgtaatgggaacacctccctcccaggtggttgtgaggatcaaagcgggtaaaaggcgctgaagcttgcagggtgccaggagctctgagttcggagccggtttattacacagcaaggccctctgccctgtcagggtctccccacctctgccctatccacgttctgggctgggacattctgtggcggggctgtcctgggcaccgtagggtgagtgtgaacaatatccctgaccaccacccaccagatgctagtagcaccctgtcccctaagcggtagcaaccaaaaatgtcccctgggaagcactgtcaaccccgcagtgagaaccttggacttggccttcagccctgcagtagctcatggtgtgctgtgaccgtgatgggcctcagctccctttctttcctccccactcaccctttagcagtgagtgactcctatttgcaaactgtgtcccggacacactcctcacctggttgttcaggttctccgtgactgtccttctgcccttccagggtggcagcttccacctgagaggacaggagcccccacggggtcccctgcacgccctgcaatgaggggcagcccggcatctgtggggtcttctgggctgctctctggcctctgagctccgggtcttcctgggctgctctttggcctctgagctttggcaggtccttgcccaggcttgcttggctgcccccaggggtggcacttccacaccctcccagtcaccatagccctgacctgtcgatttgccagacagttttctttaagtccatttaaaaatgactcacctctttgatcttggcctcttcctgaacagtaatgtccccagagttgtggaacgttaatgtgctagttgcacatacttttatttatttattttgagacagaatctcactctgtcacccaggctggagtacagtggctagatctcagctcactgcaacctccgcctcccgggttcaagtgattctctggcctcagcctcccgagtagctgggattacaggtgcccgccaccacaccctgctaacttttgtatttttagtagacacggggtttcaccatgttgaccaggctggtctcaaactcctgacctcaagtgatccgcctgcctcggcctcccaaagtgctgggattacaggcatgagccactatgctcggccaagttgcacatacttttactaattcgcgttcaaatgagcttaaccactatattaaaaaaaagaaaatttgtatcttcccaaatactgaggggggagtggattgacgaattgatgtttcttggtttttggacaaattaattttcaagctcactccctgcgtgactggcctgttctaggatgctggacttggttagatctgggtccgtctattccctcctgctcccttgaggagctcggaaaatggccttccctgttggggcggggaacatgggaagtctctacctcctgcttagttttgctgtgaacctaaaactgctctctgaaacaaagcatattaaaaaaaaaaaaaaaaaaaaactggctgggtgcggtggctcatgcctgtaatcccagcactttgggaggctgaggcgggcggatcacctgaggtcaggagttcgagaacagcctggccaacatggtgaaacctcgtctcttctaaaaataaaaaaattaactgggcgtggcggtgcacacctgtagtcccagctacttgggagactgagacaggagaattgcaccgagatcctgccactgcactccagcctgggtgacagggcaagactccgtctcaaaaaaataaataagtggccgggcgcagtggctcacgcctgtaaagccagcactttgggagccaaggcgggcagatcacaaggtcaggagatcgagaccatcctggctaacaccgtgaaaccccgtctctactaaaaatgcaaaaaaaattacccgggcatggtggtggccggtgcctgtagtcccagctactcgggaggctgaggcaggagaatggtgtgaacccgagaggcggagcttgcagtgagttgagatcgcgccactgtactccagcctgggcgacagagcgagactccatctcaaaaataaataaataagtaagtaagtaagtaaataaatacataaaataaaaaactggccaggtgtggtggctcacgcctgtaatcccagcactttgagaggccgaggcgggaggatcacctgaggtcaggagtttgagaccagcctggccaacatagtgaaatcccatctctacaaaaatacaaaaatcagccgggcatggtggtgggcgcctgtagtcccagctactcgggatgtgggggcacgagaatctctggaacctgggaggcagaggctgcagtgagccaagatcacaccactgcactccagtctgggagacagagcgagactctgtctccaaaaaaaaaaaaaagaaggtagtcaaaggagtaaaaaccaaaacaaacaaacaaacaaaagattttcccctgctcagaaccttccggtgacttcctgttgcccttgggaaaaattctgggccctttcgcgtggccccttcgctctgtcatctgtggccttgtccttccttcctttcctccctttcttcctcctgcacctgctcctttcctggcacagccgccttccctgcccgcccttccctgccgcaggacctgtgcacttgctgtgcccgctgcctggttctctttccacccagccggctccttatcactctagtcacttcccttccctacttctcctcctttgcatgtcacacgatcagagctgggtattagtctgtttgtgtatctgtttgtctcatctactagggcaggggctttttctggaagggccggagaataaatatttttggctttgtaagccagaggtcatctctgtccagaccactctgctttgccgttgtagcaagaaagctcccgtgggcgagtgtgcctgtgtttcagtaaaactttatttatggacacaaacgtgaattccgtgcaatttttacattataagacatttttcttcttttgctttttttttcctccaacgactaaaaaatgtcaaaaccattcttagactgcaggctgtacaaaaacaggtggcgggcaggattgaacctgtgggttgtagtttgcaaatacctggctagggtgtgagggccacactacggaaagctatggaaaccatgtcagcctcacgacccctagaatgtacggcagctccttagacgtggtgggtgttgagtggacattccttgttgagtgaatgaatttttttttttttttttgagacagagttttgctctgtggcccaggctggggcgcagtgggctgatctcggctcactgcaacctccacctcccggattcaagcgattctcctacttcagcctcttgagtagctgggattacaggtgcatgccaccacgctcgactaatttttgtatttttagtagagatgggattgcgccatgttggccaggctggtctccaactcctgacctcagggcatccgcctgtcttggcctcccaaagtgctgggattacaggcgtgacccaccgtgcccagcctgagtgtgaatttgtatcttcctaacttcaaagcatttagagtcatattctagccttaaaaaaaaaatggggcatggccgggtgcggtggctcacgcctgtaatcccagcactttgagaggccgaggcgggtggatcacctgaggtcaggagttcgagaccatcctgaccaatatggagaaatcctgtctctactaaaaatacaaaattagttgggcgtggtggtgtatgcctgtaatcccagcttgttgggaggctgaggcaggagaatcgcttgaaccctggaggcaggggttgcagtgagctgagatcacgtcactgcactccagcctgggcgacaagagggaaactcagtctcaaaaaaaaaaaaaaaaaaggtcatgggtcatttcaaggatccttaaaactgcaggaatgtgagaaaatgcgatgctgacatccacccagacagcctcaccataaaggagggaaaaaacagctacaaacagtgtaggtggggggaacgcttcgctgtttgagacgccagactctcttgctctgggattcacgcggctgcctttctgttacagctcaccaagcgtcagaagcacgtcgagccgtgtactcggcccaaggagttcagtgtgacctggcaggaactgagggtttgtttaaaaggaagacagcattgcacaatttcacaaggcttttgttttgtaagcatcggaactctcctcgttaccagtgctagcgcccccgatgggaggggcaggggagtcgcagatggtggtttctgctgtccctgagcacagaaagcctcatgagggaggtggcttatccagtgcagagctcagctttgtagagtgagtggacaagtgcccgtcggtggccatcgtgcggtcagtagccgagtgggggactgtgcccggccacacttcctttgtctcactcttctcctggctgacaggcattttctgagccaagtaggtctttggcatcttagatttgggcctgtcccaggaacgttctgacttgtcaagaaatcgtaccgttaatttacggtcatgctttctttccttgattgaaataaacaatctggagaggcttgctcagaatttcttggctttcaaaagttgcctgtctttttttctttttctttttcttttctgttttttttttatttttgcttgccccctctctctccctgcttctctggctcttcctcccttccctctttcttttctttctttatccacctcagtgatctcagcaaacacgaggggatggatgacaagtttgcgtccagccatctccgccctgctggcaggctgtgcctctttggcggtggccgagcgcgaagttgctctgtggctctggactgggatcgtgtttgttcaatggacaaaggctgagaatcccgaggccgactgcccagtggctgctgcacctcaagaccccgagggctctcaggtgcacagtgacagtcactcacgcagacctggccccgtttgctggtaggcgcgaccaccgttgtgtttttcagacaagcctgggtgacttgctgtgaaaacgtcagctgagggcacggtggcaggatttccccctgcatagacctcccgtcagcattcatagctggacccaagtgctggcaccttccgagccgccggcagtggcggtgggcctgtttgcgtttttgcggctgccctagtctccagggagagagcgtggagacagacgatttgtatgagattagccggccgtggattcagaatcgctctttgtgtgatgggtcccaggggttccttttgaccacagagccagcctgaaactacccacgggtgctgtggaccccttgatcatggcgggatggaaatgggctgtgccctcagccgggactcaggactgcagcatgtctgggcagcagcctggaagctggccagcctcggcgcccttggggacagcccttgacactctggctcggtgccctgagtgagggggcgccaccctgggctccctgggatgcgagcaggacccaagccaggctgctggaccgggacagtcgcgtcatgttgctgttgtccccttcctgcagcatctccatactctcctaaaatcccatctgtcagacagtgttggctgtaggcagagcgggcctcctgtcttgcagtcgggccgcgtggatctgattgtcttgctcaggagagagagaagattgccgtccctagcatgcacttgagtcaagcctctggaatttcaactcctgctccctgctctattccaactgcttcccccaggaaggggggacgaggcggaggaagtcgttctcttgacacccctagaacataaggcatcttggccaggcacagtggctcacgcctgtcatcccagcactttgggaggctgaggagggtggatcacctggggtcaggagttcaagaccagcctggccaacgtggtgaaaccccatctctactaaaaatgcaaaacttagccgggcgcggtggcacgtgcctgtaatcccagctactcgggaggctgagggaggagaatcgcttgaacctgggaggtggaggttgcagtgagctgagatcacgccactgcactccagcctgcacaatggagtgagactctgtctcaaaaaaaaaaaaaaaaaaaaaaaaaaaaaaagaacataaggcatctcatgttactgtctgtctgggctggaattggtggaagccacagaatttttttggcccctctagccacgggtgtcctgcgtaccccaaaggcagagcagagcctgcttctcagctagagcctgaagggcagctgccgttcatcaaaacagctcctgtgcaattctgtgcctgtcgctggctcaggggcgcgggaggagggatgggctgcagcgagcgggtgtggtcaggcccaggctggtgcgtggtcactgggagctcgggcagcatggctgtcactgtagccacaccctgggtccctctgagtgggtttgcattgtccagctccgcgtgagagttgtcaagttcatgcgtgcctggtcaggggcgcagggtggccagatgaccagtgtctcctgcccgcagggcctcttggtggaaggagatggagaataactgccaagaggggtagaaaccaagcctggaggccggatggctgtaacccagcactgtgggaggctgaggtgggaggatcggtggaggccaggagttcaagaccagcaagggcaacatggcaagaccccatctctacaaaaactagaaaaaatttgccagatgtggtggctatgtctgtagtcccagctactcgggaggctgaggcgggaggattgcttgagcccaggagtttgagcctacagtgagccatgattacaccactgcactccagcctgggcaacagagcaagaccatgtctcaaaaaaaccccaaaaaaccaagcccagggaagcacagggcagtgcagtgcgccgggaggcttcccataggaactgctgtttgcgcagagccttgtccattgtgggaactgtcacagatgactgtgagcttgagagcagaggaagtagcgagaggaacttgggggtgtggcctgggagatctgagaggggatggggtcagggtgaagcccacctggcatgctggaggcagctgggcacccaggctctggggtgtctctggaggtgttacccgaaccagtgtgatcatggggacatgaggcagcaggcagccccgtcctcgaggagctcagagtctagttggcaagtctagaagccattcctgtcaccagggagggccacctcacagttgcccaactattggcgtcagtgtgctggccaggttctgaattttctaggacagcctcccttagaaatgatcctgccattttaaaaaatatatatttttatggagctatcattcacatactatgaaattcatcttcttaaagtatacaattcaggctgggcacagcggctcatgcctgcaatcctagcactttgggaggctgaggtgggcagatcacttgaggtcaggagtttgagaccagcctgggcaaaatggtgaaaccccatctctactaacaatacaaaagaattagccaggcatagtggtgcacgcctgtagtcccagctacttgggaggctggggcatgagaatcgcttgaacccaggaggcggaggctgcagtgagctgagatcatgccactgcactccagcctgggtgacagagcaagaccttttctcaaaaaaaaaaagatacaatttagtggtttttagtacattgacacagttgtgcaaccgtcaccactatcaaatgttagaacctttctattattacacaaaggcactctgcctccaccagtggtcactatccatcccctcccccatctgctggtacccacacatctctttcctgtctctggattggcctgtcctgaacatttcatagagatggagtcacacactgtgtggcctgttgtgtctggcttctctcagtgggcgtgatattctcaaggtgtatccacgcatggcatgtgtcagagccttgtcccttttctttcttttttttttttttttttttgagatggagtcttactctgccacccaggctggagtgcagtggcatgatctcagctcacctcaacctccgcctcctgggttcaagtgattctcctgcctcagcctcctgagtagctgggattacaggcacctgccaccacacccggctaatttttgtatttttagtagagatggggtttcaccatgttacatggccaggctggtctcgaactcctggcctcaagtcatctgcctgcctcggcctcccaaagtgctgggatgacaggcgtgagccaccgcgcccggcccactttgtctctttacctggctgcatcctattcccctgtgcggggggtgtcctgttttgttttccattcatctcagtgggcatttaagttgttctcattttttcagccccatcctctccccagtctgtggcagagctcagggattcctgtgctgcaccatgcagaatacaggccgagatggccccggggcagacacagcatagaaaccatttgtggggctggggtgggcggggtcagcttggcggatgctgggctgcggctaggctttgaggtgcagtggcccggcgggcctgcaggggtgcagaggtaccctgtgaggccacagggtctaggctccaggtcattagtggcgagtccgcgccacgggcctcttctctcagcctgagctggcgtgcctcagccagtggggccctggcagggacctctctgtgcagccacagggcccctgtgtctccgctccatggggcagcgtggccccagctgaccacagctctgacttgccctttgctgtgtcctgtaaggtcacccctggtgagcaggacccctgagtccaccacaccagggcccgacggctgtcctgtccccctcgtcctgtttttggtgtcaccccgctgtctggttagctgtgccggcctccctgaggggcttgtgagaagatgccagggcctttcttccccagagctgctcccgcgaatccagcctggggttggagagcacgctgctccctgggtcacttccctttcctggtccggggcctggtcccagccctgacagggttgtgagccttaggaggtggccatcaggttctaaatgtgcccctggggcccagcagcctccacctggacgtccccccaggaggttaaaggggtgagtgggagccccccccaccacgccgggccccttgggagtgcaggtgggttctccaggggagcaggtgacactgccaggcaccggcggtgctgtacagtcagcccagtgccaagccccacctcttcccacctgctctgcagtgctctccctgtggggacagtgatgtgcctggggactgtcacctgctctcccctgacagaggatgtgggttacctggggtgccccatcagtaccccaggggctgctgatgaacatgggaagaccccatggcagggggcggtcacgtaactaaacactaccaagtgtcatgtggtgaaggtggacccctgcctcacaccatggccagaagccaaccccacatgtagcagagatgagaacatgttactaaaacgattacaaaacctctagaagagccaggtgcagtggctcatgcctgtcatcccagcactttgggaggctgaggtgggcagatcacctgaggtcaggagtttgagaccagcctggccaacatggcaaaaccccgtctctactaaaaaatacacaaaattagcctggtgtgttggtgcaggcctgtaatcccagctacttggaggctgaggcaggagaatcgcttgaacctgggagatggaggctgcagtgagccaagattgcaccactgtactccagcctgggcagcacagtgagattctgtctccaaaaaaaaaaaaagccagacgcagtggcacatgcctgtaatcccagctactcaggaggctgaggtataagaatctcttgaacctgagaggcggaggttgcagtgagccaagatcgcaccactgcgctccagcctgggtgacaagagcaagactccgtctcaaaaaaaaaaaaaaaaaaagcctctagaagaaaacctggatgtatatgtaaaatgttgtatttcctttttttaaaaaaatttaaaattatttttatttctatgtttttaatggcttgtctgtataaccaaaagtgatgttctctctctctctctctctctttctctctttctttttttgtggcggagtctcactgtgtcaaccaggctggagtgcagtggcgagatctcggctcactgcaacctccacctcccgggttcaagcgattctcctgtctcagcctcctgagtagctgggactacaggcgcgtgccaccacacccagctaatttttgtatttttagtagagacagagtttcactgtgttggccaggctggtctcaaactcctgacctcgtgatctgcctgccttggcctctgaaaatgctgggatgacaggtgtgagtcactgcacctggcctaaaagtgatgtatgttttaaggcagcgctgtccagtgaggatgcagaacaagcccgtgtgtctgaattttctggtagctgagttaaaaggtgaagagaaatgggggaaattaattattacagtgtattgtattgaacccagtatacccccagttttatcatttcagcatgtaatcatcatcttcaaaactgttggtgagatgtttcacactgctttttcttttcttttttttttttttttgggtgctgtctttgacattcattgtgtatttcccctgagagctggccctacgtggttgatcatttggggagggccctggccccggatgcactgagcgtgatgccagcctggtgctatagatggggtcctggtgcttagtggaccagggcccacgctccttcctcccaccctcccaatcctgcccccgcctatcccaggcaggacttatggctctgatggtgtctggctggagagatgagacacacctgacattcaccagcaatggcaggacacgctgcgacaggtgcggctgaagaagagctaggctgtctggcggtggtcctggcctatcttcccagtgggctctcgcccacagtctctcgcctttgccagggagcactgaaccgtggactggtcctgggggccaaggggtcctggcggcccagcctgggcagcgcctctggcatcgcagctggtggggaggcgcagggctggtggggcttaggaggcgcttggcactgaggaggtgtttccgggaagagaatggcaggaagttggaatgcttctttggctgtaggaaagcccagaagagagacttgtggatcagcaccgcccaggaataacatcctatagccacaggcggcttcaaagggcttgagctatcagggcaggattgcgggaggattcgcagcagggaggatggacacccggagacctgctacccatgcacgtagcctgctgggctcagatccacctctcctgggtctgtgtctttatttccaaagtgggggtggctctgcaggtcccgcttcaaggctgggtgaggttaactgaattaccacgcgaaaagcccttggtgaagtagttctcaccccaggggcaattctgtctcttaagggacacctggccacagctggggacatttgtgatggtcaggatttaggagtgctcctggcgtggggtgggtggagggcaaggacactgctcagcaccctgcagtgccccgggcggcctcatcccagggaaggctccaggccagcatccaccgagcggaggctgaggccccaatccagagtggcgctggccaggttgggccccgggaggtcacaggaatgatttttctctgggcttgtttctgctcttgactgtgaatagaggtgctgcactagaagtttctaaaatctttttccattccaagacagcttagggtttatgctgctcttcgtgtttgtgctggaaaggaagttaaggagccgtggaagtgatcataaagcaacttgaaaataatagtttttgcggcctctttattataatggggcagccaggtgggttggccggggttttatgggccaggaagcaggcgtgggggtttctgggggaagctggacccgaggcagcgttgaccccaagaccaggactccgcgtctctcctgttccggcctgttccgtacgcctcgtcaggttttctgctccggtgaacttggagtgtgttggggactgacagatccagagaacatgcccctctgctgcatgatgccgctggggccctcgggagggcttggggtgtgtctgtgggtcttgcaaacactctcctcttggtgagaaggatctggttgcattttgtgcccttgggctgtcccctggctcggacagaggtgtccctgctgtaacccccacttcgcagggtaccagatgccactgcccaggagttactaatgtacctgggggtctggcacctgctccgtgaaacccgaggtctccctgtactaattaatttggcctttagccaaagggagggctgcagccttcgggatctgctgggtcacagtgggtgttaccctaacaagtttcctagagggatgttcattagaaaaataatttattttatggtataaaaattagcaatgacaggctgggcacggtggctcccgcctgtaatcctagcactttgggaggccaaggcgggcagatcaccttgaggtcaggagtttgagaccagcctggccaacatggtgaaaccccttctctactaaaaatccaaaaattagcccagcatggtggtgcacgcccgcagtcccagctactcgggaggctgaggcaggagaatctcttgagcctgtgaagtggaggttgcagtgagccgagatcgcgccattgcgctccagcctgggcaacagagcgagactccgtctcttaaaaaaaaaaatcagcaatgacagtgaagtggaaacaaaacaatacaagctgccgtcatctccagtgagcttccgaggtctctgctccatccatgtggatgtttgggaggggccctccgtgggctccaggcggctggtttagaggtggtagaatgttctagctctgtgaggctgggattcccaagtggagacctgtgatgctgctgggtgacaggcagaggatcctgctgtgcaggctggggctgccatgggaggcttggagcccgagggtggtgaggatggaattaagggatctggccccgcgtgctgtgccgggtgagaggcgggtgtgagcatggcaggaggctttgggggccgaatgtgcagtggaagcctggatggtgagcggatgagctggtgctggaacccagacccgccttcactgcccccagcgttgggccaggaccgctcatcctgtgggcggatggttttgctctgagcctcagcaccggttccaggagcgcagcctgggagcgcggattgggactgtctgtctctggccaaggctgtgtgtgtctcaggaagcctccccggcgcccagccctccacctctgtgtgttctgcaccggccgtctcccggtttttccctcgctgtctgggcctgaaacagcccagaagagaaatcggatctcttctcagcctgagcttctcttttagcctgagctgaaagagatcatcttgggaaggagctccccagcccggcttggattggtcccctctctggtgccccgggggagtagtgatggattcaggacttggtcctggtctgacctgccgtgggggctgtgatggggtcctgatgtgccccgtgtgccatggcgctcgccaagggccagcatgtctgcggcctcacaggggcttcacgagccacattcggggcagcgcttggtttggagtctagagccagagcctggcgtgggacccgagctcgtgaactctgtcagtgccactgacttggggcagtgtctccgtgtgcctccctgtggggcgatggcggagtaaacgggtgatggccactgagcgctggccgtggggactcttggtcctggctgccaagtagaagcttcaggggtgctcttcacagtcagctgactctgctgtccctgatagcagaagacagcgaaggcacctgccccctgccatggcaggtcggcgggcacagaggagggctcgggaggctgtgtcctccagcgtctccatgtttactgtgccaggccaggtgctgaggggccggcgaggaagacgtgaggactggagagagcctggattagggccctcgaggggcggcgctgctttagccgggggaacagggagggcctctcccagcaggtgacattcagtcagagacctctgagcgactcacacctgcccacctttgcaggatttgggacaagagtgctccaaagaagtgcaggcagcacgtgcggaggccccaaggcggaacgaggcgcagctcactgagctggcaggagcagagaggactgcaggggcacagaggccggagcagcagtgcctgctgcctagtcagccgtgagggcaaaggctggaggcactgctgtcagaggtttatgcctttttttatttttattttattttatttttttttttgtgagacggagtcttgctctgtcgcctaggctggagcgtagtggcacaatctctcggctcactgcaacctctgcctactgggttcaagcgattctcctgcctcagcctcctgagtagctgggatcacaggcgcccgccactacgcctggctaatttttatatttttagtagagatggggtttcgccatgttgcccagtctggtctcaaactcctgacctcaggtgatctgctctcctcggccttgtaagagttaaagaaagaggaaagaaacacaaaatgcagctggcagttaaaggcaagttttctttagttaaaacctgagaggcgctcttggccgattgcggtcaggagcgctttctcttatagactaagagtatatattggttttagggtgaaggggcttatcacaagcttggaacgtttctgtgtgtggagaagtttatggcagggctggaatctgtctgggaggaggggaggttatcttggggcagacatcttcccggccggaggggggttatctcggggctggcatgtctctggttggggaggagtttgcgatgtttctggctggagatgctatttgtggtttatggtcatgctgatcttagctgttaggctgataccctttggatttagcggtcttttattaaggtgaacttttagaatgaggggcttgtccgggatggcaatgcttctgctgtcaggcctcccaaagtgctgggatgatgggcgtgagccactgcgcccggccagtatatgtgttttaaagacctctctggtggctgtcaggagtgaaagcaggggacctgtcgggaaactccaggcgtcgcccaggtgattcatggcaatggctcaggagaagggggtctgggctggggctgcggcctggactgggggtggcttttggaggtagacaggataggcctggctggtgggttgaatgtggagtggggagatcactgctactcccagggtgcagcagctggtttcacgcccccagctcggccacttcctgcacagcgatgtggtcttgggcctgagaacgtgggaataacaaactcagtttctcccaggctgtcagagcagtcacagatcccttccagcacacgcgagcaaagcggtgcaggggcaggagctggggccctccgttcagttcactcctacctgggggctgcatcgggcaggacaggctgcgggctcctccccacgtacctaaccccacggcccatgccagtcacaagccccaggctgtgtcctgagcttctgctggacgcgctggaaaccagccttctcatgaacccttctttttttttcttttttgagacggagtcttgttgtgtttcccaggctggagtgcagtggtgcgatctaggctcactgcaagctccgcctcctgggttcacgccattctcctgcctcagcctccggagtagctgggactacaggtgcccgccaccacgcccggctaattttttgtatttttagtagagacggggtttcaccatgttagccaggatggtctcaatctcctgacctcgtgatccacccgcctcggcttcccaaagtgctgggattacaggcatgagccaccgtgcccggcctcatgaacccttctttgagcttaatttgctaatgcacctctcaaaactcaggggagctgttacttacgtttaccagcttattagaaaggattttacaaaggaggcagatgaagacatgtgtagggtgagggatgtgggaaggggcacagagggttccgtgctctccccgggctgtgacgtctccaggaacctccacgcattcatctgtggggaagcttccatcccagtcctccgggttttacctcagcttcctcgcagaggcttgggtgacctcactgcattggcctgggtgatcaagtcagccttcagccacatgcccctcccctcccgtccagcctgggtcttttcagtgagcagccctattccctcagctcccgaggggctgccaagcccttagtcacctcattagcacactggagaattccgaggatctgggggagtcgtaggccaggaaacaggacaaaatgtatttcacagtctcactgggccggtcccttgcctccgcttccttgtctgtgatgagaggacgggagggtggctgtctggacagtgctgaagtggtagaggtgagtcgctgccgtggagggcttggcagggtgctctgtgaagggccctgtggcctggggtggaagccgcttgcagagtgctggttctttgcctaaggatggtggggcaggggggccgtgttcacacgtgctgttggctgtgtctgccagtcttcctttcttttttctgtttctgtttctttttctttgtttttttttgtttgtttgtttgttttgagacagagtcttgctctgtcgcccaggctggagtgcagtggcacgatcttggctcactgtaacctccgtctcccaggttcaagcgattctcctgcctcagcctcccccagtagctgggattacaggcatgcaccaccacgcccagctaatttttttgtattattagtagagacagggttttaccatgttggccaggctagtcttgaactcctgacctcaggtgatccgcctgcctcagcctcccaaagtgctcggattacaggcatgagccaccatgcccagtcttcttcttcttcttcttcttttttttttgtgagatggagtttcactttgttgtccaggctggagtgcaagggcacgattttggctcactgcaacctctgccttctgggttcaagcgattctcctgcctcagcctcctaagtagctgtgattacaggcatgcgccactgtgcccggctaatttttgcatttttagtagagatagggtttcaccttgttcaccaggctggtcttgaactcctgacttcaggtgatccactcgcctcggcctctccgagtgctgggattataggcgtgagccacggtgtctgactcagtcttccttttcatgtcatcccttgttaatttcctttagaaacagtttgggccaggtgcagtgggtggcttatgcctgtcatccaagcgctttggggggctgaggtgggaggatcacttgaggccaggagttcaagaccaggctgggcaacataatgagacccagtctctacaaaaaaattaaaagcttagctgagcatggaggtggcacctgtaatcccagctacttgggaggctgaggcagaaggatcgcttgaacccaggaggttgaggctgcagtgagccacgattgcaccagtgtgctccagcctgggcaaaagagtgagaccctgtccccgccccacaaaaagagggtcagaaccttggtgttagagcagttcacttccacccaaaaacagggacttagaaagggagacacttgtgtggagcccgaggcagacatgccctgacttagcagtgcaggtttctgtactggaatgagggcctggggcaggtggcctctggcaggatgcatctgttacctgagtctgaaggcagcgtggcgaggagatgggagggctgtgcctgggatcctggggccgtggagagctcatctagaggtcatgagtattgggcaaagctcacatgccgtgttttaatactgtcattatggaagttggcctgggggtaatccagtgtctcttttagatctgtgttgtacaaacactgaactagttctggtcgcctctccggcctttgttttggggagaatattcgatgagatggcccgtaattctaacactgtgcattttgaaggatatttataaacccggatggataaggcccttcttagtgctattcttgtgttggttccctttattattttttttaaaaaactttattatgggccgggtatgatggctcacgcctataatcccagcactttgggagtctgaggtgggcggaccacctgagatcaggagttcgagaccagcctgaccaatatggtgaaacctcgtctttactaaaaatacaaaaattagctgggcgtgatggcgggcgcctgtagtcccagctactagggaggggacaggagaattgcttgaacccaggaggcggaggatgcagtgagctgagattgtgccgctgcactcctgcctgggcgacagagtgagactcggtctcaaaaaatagtaaagcaaaaaataaaaataaaaacactgttatggagaatttgactacacagaaaggtagacaacatggaataacgagccccccaggcccctcacccagccccaaaaccatcaacccatggcaaccccccctgccctacccccatctgtggtgaaatagccctcatattatttttgttaacttttaatttttaaagaattacagaggctgggtgtggtggctcacacctgtcatccaggcactttgggaggcagaggtgggaggatcacttgagtccagtagttcgagaccagcctgggcaacacagtgagaccctgtcgctacaaaagcaaaaataagaatgaattatagactgccaaggtgttgcaaaaataataaagagatttccctaggcttcaccctgctgtctccagtggtaacattttacataactttagtgtcccgttaaaactaggaaattgacacaggacactgtggcttcagaccttcctcaggcgtcctcagtgttagcactggctcattcttttggtagagtctttgcgacattctgttacctgcacagattccaggaaccaccattgcaatcaagatacagaactgttctgtcaacacaaaggaacgctctgcttctcccttctgtcacccccaggccctggcgacggctgaggatctctgcatctctgtaaccttgcccttttgagaatgttatgtagatggaatcacagcgtatttaacctcttgggattgggttttttcgcttgcaatctgtcgaagttgttgtgtgtatcagtagttactttcttttattactcagtagttctccatacgggtgttgttttctcattctgcttatttctgtgagacgggtggcagtggtaaggtcccatctttcattcccgattttagcaatttgagttctccagagatggaggacaagatccaaggttgccagggcctgggggcgacagagtggaagcagagtgagttcctttgtgttgacggaacagccctgtatctgattgcagtggcggttccaggaatctgtgcagataacaaaatgtcacgaagacatttaccttcgacagttttactggtcttttcaagggaccgacttttggtttcattggctgtctctattttgtttatttttgctcgttatctttgttacgtactgtgctccatctgccttagtttccgtgtgctcttctttttccagtgtcttaagggagatgcttaaattaatatttgagatcttcctctttttaaaaactgtataggcaattataaatttccctctaagtactgctttagctgcaacctgtactttttttttttccttgcgataggatcttgctctgttgcccagactggagtgcagtggtgcagtcacaaatcactgcagccttgacctcccgagctcaagcaatcctcccacctcagcccaccaagtagctgggaccagaggcatgtgctactatccctggctaatttaaaaaataattttgtggagaggaggtctcactatatttccccaggctggtctcgtactcctgggttcaagcattcctctcaccttggcctcccaaagtgctgggattacaggcatgagccactgtgtctggccatcctataagttttactttgttgtgagttcattttcattcacctcaaaatattttctaatattttcttcctgttcaaccctgtgattatttaggagtatgttggttaatttccatgtacttgtgaatccccaaattactttctgttgttgatttctaatttccattgtggttggagaacttactttggatgatctgaattcttttcaatttaatgaggcttgttttatggactaacatatggtttatcctggagaatgttccatatgtactgagaagagaatatgttctatagattcttttggcttatagtgctcaagtctctctctttgttgctcttctgctagttgtgttatcttttattgaaagtgagggtatgagccgggcatgggggctcatgcctgtaatctcagcactttgggaggccgaggtgagtggatcacctgaggtcagcagtttgagaccagcctggccaacaaggcaaaaccctgtctctactaaaaacacaaaaattagccgagtgtggtggcgcatgcctgtattccagctactcgggaggctgaggcaccagaatcgcttgaacccgggaggcagaggttgcagtgagctgagatcaccccactaccctccagcctgggcgacagagtgagactccatctcaagggaaaaaaaaaaaagaaagtgaaggtattgacatctccagctattgttgaattacttctccttttatttctgtcattttttgcttcatgtattttggggctctgttattagatgcatatatgtttataattgctgtatcttgctaatggattcacctttttatcattataaaatgtccctctttatctctagtaacttttttgtttgttttttttttgagatggagtcttgcacttttgcccagtctggagtgcagtgttgcgatcatggctcattgcagcctcagcctcctgggctcaagtaatcctcctgcctcagcatcctaagtagctgggactacaggtgtgtgttgccacgcctggctaatttttttgaattttaacagaggtgaggtcttactatgttgcccaggctggtgtcaaactcctgaactcaagtgatcctcccaccttggcctcctgaagtgcttggattacaggcatgagtcattataccacacctggcacatttttttttaagtctattttgtctgatgttagtgtagccactccagctttcttatggttcctgtttgcatgttacacgtttaatttttatattttcagcctgttttttttttttttttttttttgttattgttgttttgtcttttttgagacagggtttcgacctcccggcatgcaccaccatacctggctaatttttgtgttttttctgtagagacgggttttgccacattgcctaagctgatctcgaactcctgggctcaagcagtttgcctgcctaggcctcccgaagtgttgggattacaggtgtgagccactgtgcccagcctattttcagcctgttcgtatctttgaatctaaagagtgtcccctggctgggcgcagtggctcacgcctgtaatctcagcactttgggaggccgaggcgggtggatcacctgaggttgggagtttgagaccaggctgaccaacatggagaaaccttgtctctactaaaaatacacatgcgtggtggcgcatgcctgtagtcccagctactcaggaggctgaggcaggagaatcgcttgaacccgggaggtggagattgcagtgagccaagatcatgccattgcactccagcctgggcaacaagagtgaaactctgtctctcaaaaaaaaaaaaaaaaaaaaaaaaaagtgtcccctgaagacagtatatagtatagtatatagttggatcttgttttttaaatccagtctgacaatttctgtcttttgattggatgtttaatccattcatatttaatgccgttattgatatagttggatttgtacctgccatttccctttttgttttctattttgttcctttattccttctttgatgttttcttttgcattaagtgaatattttctagtgtaatattttaattcttttcatgattgttagcactatatttttggaagtattttcttagtagttgctgtcggtcttataggcatcttaacttctcagaatcgacttcagatccccaatatcatttgaagcaaggctgtgcttactccttttgaactgtgcttagcaatcaggatttcacttaatcagttcaatggcttgggttttcaaggatgctgatgtgtttgtttgcctgaatggtgcctcttcttttgctcattcctcctcacattcagtgaaatgaacacatcaaagccctcttaggacctgtgatcatcaaaaccatttggagaccccactgtctcgggagcagggcttgggaaggacaccagctcccctgtcatccctctccttgtgtttctggcttcttttcatctcccttgcaccactgaaactgatgagtttgtagccctgttcctgacacaagactccaaatctgtgtcagtgggtctcacccacttggaggcaggtcttttttttttgagatggattcttactctgggcaacagagcaagaatcctgggttcaagcgattctcctgcctcagcctcctgagtagctgggattacaggcacccgccaccacatccagctaatttttgtgtttttagtagagacggagtttctccatgttggccaggctggtctcgaactcctgacctcaaccgatctgcctaccttggcctcccaaagtgctaggattacaggcatgatcctctgtgcctggccgaggcttggcatttttaatttgaattggtagagagtgggtgccatcatcgttttgatgatcattcaaccccaggaatatgcatccctttcctgagaggcactctcatcctctacgcagagcagccagtgagctgctggagggaccttgggtcccagcacagtatcccaggctggctccctttaaatactcgttgtttttataaaagggatatgtaagtatggttggcgtgtgaactacaaatgtccctgcatcctgcgaccctgaaatggcctgtcttggtgttggcgctcctggtcgccgcggtgtcacgcgtagatctttgcttctcagtggctctgcagtcctttattttggtacagatatgtgtaatttacttacccattctcctactaatgagcacttacttttctctctctctttctttctttttagacagtgtctcgctctgtcgcccaggctggcctgcagtggtgtgatctcagctcaccgcagcctcctcctcccagttcaagtgattctcctgcctcagactcctgagtagctgggattacaggcatgtgccacgacgcctggctaatttttgtatttttggtagagatggggtttctccatgttggccaggctggtctcaaactcctgacctcaggtgatcagcctacctcagcctcccaaagcgttgggattataggcgtgagctactgcaccgaactacttttttctcttttaaacaatgctgctggccacatccttgctgccagcccttctaggtggggttgctcagagtgtgtgtgcctgttttatttttatgtttttgagagggggacctgctctgtcatccaggctggagtgcagtggcatgatcacagctccttgcagcctcagccccctgggctcaagcgatctcttgcctcagcctcccaagttgctggggccacatgtgtgcactaccacatctggctaatttttttttttttttagtagtgacgcggtctcgccatgttgtccaggctggagtttattttgaagcgtgttgctcagctgtcccctgaggtggtctgaatttgtgcccctgcacagtcattgtgggacagtcattgtgttggggacagctctggtctctgcccctccttataacctgtctcctcgtgctggttcttgtttgagttgccagttcatagcctttgcctgcttgttgatttggtatgttttttttcttgacttaaaaacaaaaaaacaaacccaaagcttctcaaattcggcactcttgctatcttgagctgggtccttctctggggtggggctgtcctgggccctgcagggtgctgagcagcagccctggcctccacccactgcatgccaggagcaccccctagtcgtgacaaccacagacagccccagacctcccagtgttccctgtgggcacagctgcatggttgggcagtgtgggtctgggtgagtgggttctttgcatccctggcctccaccccctccacgccagcaccaccctcagtcgtgacagccataaatgtccctagacatcggaaggcatcctctgggggcacgatcagccttggtggagaacccctgttttggaataaccctttctgtacccgggctattaccaccctattgtgttaccttttttctcagttcctcacttatctttagttttatttttggtgcgttgttacataggatgttttcaagttgcctgatgtgtccttccctttagggcttccgagtttgtgtcccacttagagaggtttcccccgccctaggagtccaggagcgtcggcccctggcttccactgtgtccttctgtggttcatgaggacctgccatctgggggcggcgaggtgggctgggctttgtgtttccaacatgtccaccccagccggctgggcctgcgtacccagtgggtggcgctcaggtctgcagctgcctccttggctccccggttgttagctgtgtgatctagggtaggccacttcctgcctgtgcctcagtttcctctcctgggaaatgggctggaatagctgtccctgcctcctccggttggtgggctggtcagccatgccaggcactcagagtcatccctgcctcctcgagttggtgggctggtcagccatgccaggcactcagagtcatgcctgcatgggggctccaggacctcgtcatcagcctcttcatccttactgtctggtctgttccaaaggccgcaggccccagaaagacggtgacactccaggaggttgctagacctggcgggccccagggccaggagtgaggggcggacgtgccactctgcactgctgtccctctccacccaggccttggggctcccagacaaccatgaaattacaaggcaggtttgtagatgcatagattatttagttaatgattatggttttaaatggttaattatggaacatcagatacctataaataagtgtgaaacatggactggtcctcttgtgtctgccaggggttgcctcctgactgggtgggagcctgcttgggggcccaagtctgctggcatccccgctctgtgtggctccatcccctcgcctgggggcagtggacggacaggtggcctttgcccgtagtgctccccagaccctgttgagtgcctggcaaagatgtaggtgggctgcacctccctttgtgtggaaggttccagaaggaagtgccaggtgaccaagcctgtgtctgtcctgggttttcttggctcttcacccaaacacttcccttttttgttgtttttgttttaataaaatttttttggacataatttcagactgaccccaaaattgcaagaataataggaagaattcccagacacctttcacccaggacccccatgtggcgacattccctgctttgcctttaatcctttcctctcattctctttccctgcacttcttcctaaactgtcagtgtgtggcagacatgacatccctttacctctccttcagtgtgtatttcccccagacaaggaatttttgtatcaagttatcaaaatcagaaattcacgctgataaaatcaaatctacagaccctattctgactttgcagtaatgtccttaagagtcagaagagaatccaggatcaacacagcactcagtcgtcttgcctgtcggttccttttaacctggggctgctcctgagtctgtctctgggttctctgactctgatgttttgggggcgtacaggccgtcattctgttaaatgtcccccaggtgggtttgtctgatggttcctcaggaccagattcaggccacacacttttggcaggaaagtcctggagccgacattgggtccttcttagtgcgccctatcaggaggcccatcatgctaatttgtcccatttctggtgatgttaaccttgatcctttggttaaggtgggcccgccaggtttccccaccctaacattactattgtaccatttgcatctcatggggaggccagtgtaaacacgccgttactcctcaaacgttcactgcttgtttcagcagacattgattcttgccgcatggtggttgtctagtcctgtcatttcttctgcgtttattagttgatgtctcctatacaggacagctgtcccttgttcctttcttatttctatcagggtgggcttgtggattcttactttgttcaatgggttataatccactgccatcacgattgatctggttgctcagatggctccacatttttccagaaagagcccggtcgagctggctcctgggccatttgacatgtccccaccctgctcggagcacttcccaactttttggcactgggatgctcccagctcatcctgtagtctccctcatggtcgatccctgggattgaccaatctccaaggagccctggttctgtttgtggagaatgccacttagaaaccgagatccaggtgctccgtgtgctcagtgctactggggtgtctttgcttctaggtcctctaatcagacagagctgggaagtagatgtgtgtacatcttacacacatgtacattgtgtgtgtatatatgaatagacatgtatacatacagacacctgacatttgtatccatctctgcatccatctatccacccacccatccacccatttactcacctatccatctatccacctgtccacccacccacccacctgtccatctatccatctatccatccatccatccacccacccacccatctacccatttactcacctatccatctatccacccgtccacccacccaccgacccacccacctatccatctatccatccatccatccacccacgcatccacccatttactcacctatccatctatccacctgtccacacaccgacccacccacccacctatccatccatccacccatttactcacctatccatctatccccctgtccacccacccacccaccaacctatccatctatccatccatccatccacccaccaatcccatttactcacctatccatctatccacctgtccacccacccacccacctaccaacctatccatctatccatccatccagccacccacctatccacccatttactcacctatccatctatccacctgtccacccacccacccacccacctatctaccatccatccacccacccacccatccacccacctatccatccacccacccatccatccacccattcacatatccgtccatccatctattcattcaccgatccatctgtccgtctgtccatccatccatccacccacccattcacctatccatccatccaaccgtccatctgttcattcacctatccatccatctgtctgtccatccatccatccatccgtacatccatttattcatccatccatccatccatccatccccattaatgcccatgagttcacactgaaacctctagttccagccccacacccagggtcccttaccatctttccccatcgttatttgtaactcccttggctgacagtgagaatccacccactgcctaccataaaagcatcctccagagtaggagccaatatttcttttttgtttgtctcaaagacatacagtcccaaactgtatttaaaagtttacatggattagttcttccatttttttcccccttctttactgtggttatattgtttgcttgaaataaggtttggtttacttgtttttgtttgtgttttggacaaggattttcctcctcaactcttgctgattttagttgcctgttgattgatttcttgattcaacatacgtgatgtagtgtatagaacattagcatggttccagagtcaggactgcacaaaaaggcatgggcggagaagtgtcatcaaccccctttctcctccccattcctgcccaccccctgcaggaaaggaatctcgttagtctctggctcagcctttcagggcagctcaaagaagcagatgtgtatttttttaatgtccccttcttttttttttttgagacagagtctttctctgttgcccaggctggagtgcagtggtgtaatcacagctcgttgcagccttcacctcctgggttcaagtgatcctgccacttcggcctcctgacttagctgagaccacaggtgtgtgccaccatgccaagctaatttttttatgtttttatagagaaatacagggtcttgctatgttgcccaggctggtctcaaactcccgggctcaagtgggctcccaaagtgctggaattacaggtgtgagccacggcgcctggccttataccttttctttcgcacgtgaaagtggcgctgtgctctgttcatttagctgtgtgtcctggaaaccacttcattggccagggagctcttcctggctcccctgcacagctgcgtagtgttccttgcagggatgcagcgaagtccacccagtgtctctcctgcatgtagatatttagtttgtttccaggctcttacggtggcgaactgtgctgccgtgagtaacctggtgtatatggattttcacattggtggaagggtatcttcatggtagattttcgtgagtgggattgctgggtcagaagtgcagacatattttgttagcttttatgctaaacacccatgtaagtcctgttccgccagctgtgtcgtctgggagggcctggttcccctgcctcgccagcagggtgtgctgtttcatgtctaaatacttgccaatcccagtgctgagaaatgggggctcagtggagttctaatgattgttcctgtagttatgagtggtgatgaacatcttgttgtgattaaagctgtttttgtatcttttctgtgagctgtatcttcatacttttcacttgcttttttctattggatatttgactctttcctcctaacttgaaactccaatatgtgaacctctgtggtatgtattgcaaatatttcctttgtgttttttttttctttttttttctttttgagactgaatcttgttctgttgcccaggctggagtgcagtggcacaatctcagctcattgcaacctccgcctcccaggttcaagcaattctcctgcctcagcctcctgagtagctgggattacaggcgtgtgccaccatgtccagctaatttttatatttttagtagagatagggtttcgccatgttggtcaggctggtctcaaaatcctgacctcaggtgattcaccggccttggcctcccaaaatgccgggattataggcttgagtcacctcacccagtgcaaatattttccctcggtctctggattgccttttggctttgttattggtgtttggttttcttttgccctgcagagtgtttttttttctttctcctttcctttcctttctctctcctttctctctcctttctctctactttctctcccctttctctctcctttcctttcctttcctttccttctttctttcctttcttctttctttcttttcactttctttttctttattctctttctttcaagacgaggtcttactatgttgcccacgctggtctcaaactcctgggctcaagcagtcttcctgccttggcctcccaagcagctgaaattacaggtgtgagcctgtaattagccacacctggctaattaaaaaaaatagttagctgggcacggtggcttacacctgtagtccccggactgtgggaggatcacttgagcccaggagtttgagaccagcctgggcaacatggtgagacccccatctctacaaaaaagaaaaaaaagttagccaggcatagtggtgtatgcctgtggtcccacctactcaggaggctgaggtgggaggattgcttgagcccaggagttcaaggctgccatgagctatgatcacaccactgtactccagcctgagtgacagagcgagaccctgtctcaacaaaagtcacatttctgagtctttactttctttgcctcttgattagagctgtggttgtaaagccctttccgtctctggggctggagaggagttcacctcgtttttttctggctctcgtatgattcctcctttacactcacgttccgattccaccgccgttcattctcgcagaggtgcgaggtggggacctcactttattgttttctgaatggctaccctgttgtcccagctccattgattaaaaaaatccctgcttgggccgggcatggtggctcacgcctgtgatcatagcactttgggcccaggcgggcggatcacctgaggtcaggagttcgagaccagcctgactaacatggagaaaccccatctctaataaaaattagctgggtgtggtggcgcatgcctgtaatcccagcttctcgggaggctgaggaaggaggattgcttgaacccaggaggcggaggttgtggtgagccaagatcgtgccattgcactccagcctgggcaacaagagcaagactctgtctcaaaataaacaaacaaacaaacaaacaaataaataaatccctgcttggccaggtgcagtggctcacacctgtaatcctagcactttgggagggtgaggtgggtggatccctagaggtcaggaatttgagaccagcctggccaatatggtgaaaccccgtctctactaaaaatacaaaaattagctgggcatggtggtgggcgcctgtaatcccagctacttgggaggctgagttaggagaatcgcttgaacccgggaggtggaggttgtagtgagctgagattgtgccactgccctccagcctgggtgacgagagtgagaccccgtctaaaaaaaaggtccctgcttaccccactgccttggggaaccccctctgtcccccacacagtctccgtatatgcctgagtctgtgtttggtcttcctcgtctctccacagcaggtctgccccgtgggttgttggccgcggtcggatgctcagccgcttgagaatgctgtctcctgcctgggtgcgtctggctcccctctgcgcgtcctgtttcgtgttattttttagagtttgtgcatttctctgtgtactttggtacacaaatgcttctttgaagttaatacgtggcagtaaagctggcactggggacggctagggcggtggatggcgtgtgtcctggagggcgggtgtgctggcagagacttaaggatgaggttaaggattctcctaagtccttttcttctgggggaaggagactcgtgggaacccctccagtgcaatggcctcgccatttccacacgccggcccctggcactttccaccattcgtgtgctcggctcccagctcttgccctgccacaggccctcgctccctcctcacccggcctggagtgcatggcccacagtgggcctgttctcaccgcgcatcccgccagctccttggcccttctcagcccttgctgccccccgggctcatacacctctacccacgatccagagacggatcgtcaggcccaccccagcccggcagcttcctagagcaatgccctcagccaggcatgttgtctggggacgctcggcagtgtctagacacagccagtccctgtgacccggtgtgcatgtgtgctgccgtgcacgtttcagctccccagtttcatgtagttgagaacgcttgactgtgagatgcaccacggctctgtgctccctgggagtccccgtacccccgtgcggtgagcgtgagaagtcacccacagaggggcaggaaggcggttatattttaatggtcacaggtgggcagtacccctgggtgttgggcagaggccacccctgctcccctccggaatacactccctactgtccaggcagccctcagattacagcccccagcctgaccccagagacatgcaaatatgggacagacgtaaggctttggtgccggaaccaggagcatcccgggcaaagtgagacgagctggtcaccccctgcacagtctcccacttccccaggcttcattctcccacccctggaagtggtaacccttctagaggtacctgtgtagcgtcttccttttctgcgcgctctgtgtgtgccggcctgtcctgcggccgtcacctggcagatagctgctgtcccagggatccagcacaaagcttggagatgcgtctgtgcagcccactctgtggctgtgtgtggagttgatggtggacttctgtcaccccatgacatctgaggctacaggagtggcctgtggagatgttggtggccaggtggcacaagtatggagaacacagatgcccggggcagctggcaagaaggggcaggtgcttttgaaagatgttaccaaaccgtccttcccagtggtgctgccaggccactggggcatagatcagtgtgggcacctgttcctccatggcctctgtgacctgtcgtgtcattggacttgctggtcagcctcctgagtgacaggatggtgacagctgccacttaggggacctcattgagcttcctgaagaccccacgatgagggtgttaacatggggagccccctttacagatgaggaaactgaggccccagaggtgggggcctcaccctcctccgggcctcatggtgggtggtgggggttcaccttcctttatttgcatgtggatatcaagcagttgtcccagcactgtttgttgaaacaccttttctttctgcattcagtggtcttgggaccaggccttgggggactgtgctctgtaccatgtcctcacccaggacgtccctctaagatcgctcttagaggctacagggccacgggggagaaggtccccaccattctccagcggctgcctcgccacacagctgggagggatgtggggtagagagccccctgcttggcactggccctgggggtctaagtgatatgaggggcaggggtcgcccctgcagtcaccgcgtcctcctctggcggaggtgagtggtgatgctgggtcacaagaggtggcttctcatcccagtggtctcgtgctgcacttcagggcctccatcacctgatctgggggctgtgggggtcctgggagagggctcatgggtaggggacagtttttgatgttctcttagtgaaggacagagaagaaggatggggggctggtggcggcggcagggagccaggatggtgctggtcccgcctcccttccttccatccctgctgcaggcctgccctcttcatgcctggctccccgcagcctctccctgtccccgtctgtcccgccactactggaaccccaccctgcctctgggtagtgtgcaccccatcctcagagcggaacccccatcccctgggcttgtgggggcttcacttcctgctgtttccccgcagcccacggccattctcctgctcctcccacccctcctcactgtccttcctggcactccaggcccctccgccgcatctttctgactcgtgttgccacatcatctgccctggctggggttttatctccctggcaactggaaatgtgttggttaagatatggtgagttaggccgggtgcagtggctcatggctgtaatcccagcactctgggaggccgaggcaggtggatcccctgaggtcaggagttcaagaccagcctggcaaacatggtgaaacaccatttctactaaaattacaaaaattagctgggcatggtggcgcatgcctgtcatcccagctactttggaggctgaggcgggagaattgcttgaacctgggaagcggaggctgcagtgacctgagatcatgccgttgcactccagcctgggcaacagagcgaaactccatctcaaaaaaaaaaaaaaagatatggtgagttaagagggtaaccagccctggagctgacagcctgggttagcacctctgggacttgggacggcctccatgttccgctctgtgaagtgggagtgacaacagtgcctttcccatggggctgctgggaagtgactcaacgaggagcaccagcaaggggacaccagagcgggccccagccacctcctggcagaagcatggggctcacgaggcggggcgggggtggtgaggaccaggcgcagacctgggcagggacctgggcggaacgggggaggcggaatcttctagaagggccttgggggagggccctgtccccaccatccctcgtgagcaccccctgccaacctccatctcccatttgagagttggggaacgtagcaaagttatctcaggactggaatatgaatggcagctcttggccaggctctgccatattggagaggtttctagaaggtcctggaagcccactggctcctctgtcattttcggcatggttttggcctctcctcttctcccttgcttcattgctgtgatgtcaagcatctcttcctgtgactgttgactctttttgtatcttctttggagaaatgtctgctccatcctttgcccgtgttttctgttaggttgtttgtcttttgttgagttgcaagagttgttgacatattctgcatacaagttccttatcagataatgttttgcaaatatatgttctcctgttttgtacattgtcttttcactttctctctctctttttttttttttttttttttgagacagagtattgttccatctcctaggctggagtgcagtggcacaaacatagctcactgcagcctccaactcccaggctcaagcgatcctcccacctcagcctcccgagtagctgggactgcaggtgtgcaccacaatgcctggctaatttttttcttctttattttttgtggagatggcatcttgctgtgttgcctagtctggtcttgaactcctgtgttcaagtgatcctcccacctctgcctgccaaagtgctgggattatagacatgagctgccatgaccagccaagtcttttcactttcttgaggtctttgcaaacaacttttctttttccacatgcacttttggtgttttagccagaaatcttgcctgatccaaagccacgaaggtttaatcctatggttttcctaagagttgggtagttctgagctgggtatactagctcacatctatatgcccaatgctttggaagggtgggttgggaggatcgtttgaggccaggagtttgagaccagtgtgggcaacataggaagatactgttggtacaaaaagtttttaaaaagagttttgtagtttgggcacttacatttagatctatgacctatttggaattagtataaatatatggtgtgaggtaagggtccaccttcattttttgtgtgtgaatatccagctgtcccagcactatttgttgaaaaaactgttctttttgcattgagtggtcttggcactgttattgaaaatcacctgactttaagcgtgtgggtttatttctggactctcagctttctcccgtttatctaatgtctgtacttatgccagtaccatgctgtcttgattactgtaggttcataaccgtgaattattttttgtctagtcttgagtgtagatgttaaggaaaaataatatggttcttacattaacatatagagacccagattagctgatgagactacagccttcttagttgagatccagaaaaccctggctgttccctgcctccttgtttcttctttttctttttctttttttttttttttttgagacagagtcttactctgtcacccagactggagtgcagtgccacaatctcaattcacggtaacctctgccttctgggttcaagcgattctcctgcttcagtcccctgattagctgggactataggcatgtaccaccacacttggctaattttttttttttttttaatatttttagtagagacaggttttcaccatactggccaggctggtatcgaactcctgacctcgtgatctgcccgccttggcctcccaaagtgctaggattataggcatgagtgaccatgcctggcccctgccttttttttttttttttttttttttttaaagacagagtttcgctgtgttgcccaggctggagtgcagtggcatgatctcggctcaggcagcctctgcctcccaggttcaagtaattctcctgcctcagcttcctgagtagctgggactacaggtggatgccaccacgctcagctaatttttgtatttttagtagagatggggttttgccatgttggtgaggctggtctcaaactcctgacctcgaaagatctgctcaccttggcctcccaaagtgctgggattccaggtgtgagccaccgctcccggcctattccctgcttcctttattgagccatgccaccttcctcagttggattttggtatcaataaggatatgaaggttttggtgacatatttctaaataagaggctgtttccctaggatgcagaggttggtgacaaatgtcagcttttcagttctttcactcaagaaggatctgcaacttgaattcagcaggtttggtcttcagtggggcctggaagtggaagggatgtggtggtgtccacttggtttctgatcaccttggctctttcacggcctgactctcctcttccagtgaaaacctgctatgccttgagcttcagaggacagaggtccaggtggttgtttggtttggtctttttaactttttattttgaaataattttagactcactgaactgttgcaaagatagcacagagcgttcctgtgtacctttcactcagcccctaatgtgagcatcttatgtaaccacagaatgctcagaaattagccaattccatactaccatgcaatttactcaactatagattctttttttttttgagtcagagccttgctctgtctcccaggctggagtgcaggggcgccatcttggctcactgcagccactgcctcccaggttcaagcgattctcctgcctcagcctcctgagtagctgggattacaggtgccttccactacgcctggctaacttttgtatttttagtagacacagggtttcaccatgttggccaggctggtctcaagctcctgacctcaggtgctctgcctgccttggcctcccaaagtgctgggattacaggtgtgagccactgcacctggcctcaactatagattctattagaatatcactagttgtcccaccaatgtccctttcctggtctaggacctcgtccaggaccccactcaccatttagtctcataggctcctccaggtgtgccaaggcctccatcttgccttgactttcacgaccttggcacttccaaagagcaccaggcagatgttttgtagaaggaacttcccttggctttcagacgttttctcatggttagcctgggctctggactttttagaagcataccatagggctcatgctgctccttccctgtgcagtgtatcaggaggtgcgtgtggctgatgtggctgatgcggctcagcgtggtggtgttgaccgtggccgcctggctgaggcgtcggtcaagtttctccactgcaaagttactccttttccctttgggactttgagcctgtgaacatgtcctgttccttcaacttttgctcaccaatttttacatttccgcgtggctctttcctgcaggaaatattcccgtggtgttggactggtgattttatgttatgcttattcctttgacacttatgaaggagaattcttctgtggaggaaagctgtccctcttccccatttatcagttgcattttatttatttatatatttttgagacagagtctcactcttttgcccaggctggaatgcagtggcgcgatcttcgctcactgcaacctccgcctcccaggttcaagcaattctcctgcctcagcctcccgagtagctgggattacaggtgcccaccatcacacctggctaatttttgtatttttagtagagatggggtttcaccatgttgcacaggctggtctcgaactcctgaccgcaagtgacccacctgcctcggcctcccaaagtgctgggattacaggcgtgagccactgcacctggcgctcaattgcatttcacatgttctctcaggaaagccatctgtgtgtttgttttatcctgtgggttgtaacatgatgctgtcattcatcctggtgctgaggtaggtggtcctcgttttggccatcaggagcccctcgcatgtcctttctgcccgctcccatcctgtcaagccttcccttcctctcaggtcctgcagggcgatctgggctcagcttgtatattctgccccagccctggaattgaccacgtgtcctgcagggctccctggttcctcacagtggagaatgatgtttacaaactgtggcctgggtgctggccgtgctcgatgctgttggggcatcattgcttctaggttttctctgctgacagggcttggaagtaggaacgctaacccatgtgtatatgcacacctgtatccatctcactgtctcttttccagagctcctgagttcatactcatagggtgccagagcgttcatgtcgtgggcccatctgaggctttgggtgtccacccccaacctgtaaggggtacgcagagcccctggaaaaaggaggaccttcctgtggggctgaagacttgggtgggaggcaggagatggcatgtcccttttgaaggccacctggggcttgtggccgtgggagaggcaggcagggctgggccctgggccatcccggctcaggcaacctcgccaggcgtgcaggtgagaggatcccttctttctggttcagagactcctgtttttggacccgtgctcagacccgggaaagaggtgggcagtgtggtctggtgcaggcccaactttcggaacccacccgagggtcagccctgggggctccggtgactggcagccccatggccaagagtacctccttttggggggttcttgggggccaagttctgtggtcctcaggcctctgtgctgtggtgccactgtctcctccctgattcccgccagtggtctcttcttccgccccacccgcgggtcttggcggaggggctcacagagccagcactgtatctgaggctgccctcagggtcagcacgtgcggggcagtggctgttacgtaatcggtagctcgtgctgtttgggggcgttgtcgtccgatgccttgggctgtcactgcaggcttctgtcatgctgcggtgggctccccttgccagttctattcctagtgcccagatctgcctagaagccgcagcagggttgacaggctgggcccgtggcagggtgcagtcaaacctaagccacctgggtcttcccctcctggcagttaatagaacttagcttttggagcagttttagatttacagagaatttgggcaagtggtagtgagagttcccgtctctgcctgccaccccccacccgttttccttgtgggaacatcctgcctgttgtggcgcatttgtctcttgattaacacgttgttaatgacacttcccgcttcattcggattgcctctgctttcccctaatggactgttttctgtcccagggccccccacaccgggattcctcgtggcccgtagccgtcccaggatccttcgtggcccgtggcagtcctgggatccctcgtggcccatggccctctcctcaggctcctctgggctgggaccactcccgacacgttccctgtgttttgtgcctggacagtgttgagggggctggccaggcagatggtagggcgcccctcgattggggtgtgtctggcattttgctcaggctggcacgcggtggaggctgttgggaggacttcagaggtaagggctcttctcatcacatcccggtgagcgtcaggacgtgggccatcagcaggatggggttggagccgtgtggctgttgctgctgccctgacggcgtagctgcaggggttcatcatcctctccccgggatgctgcccccgactttccatttgtgcactgatggaaggaagtcaccgcatagcccatgcgtaaggaatagggagctgcctgggccccaacccctcgtcttccctcctggaggggcagtggaggcaggctagcccggcctctcatctattgcggatggggaccagggtggacagaggcctaggctcgggctgtgccttgagaactggggcccggcctcagccccagagcctccagcctcccagcttggagtgggcgcttttggggccccagagagggagggcagaaggacccgtggtcttggtagcaccgggctgaggtctgtccagctgagagcctcagggtctggtggcttccatgccttcttgaccaagtgctgagagtgggggtggcccgtcgtgcagcgggggagagagctgtacaaagagacagttacttgtggcaggggagacccaggatcccgtggggacctggtggcagccaggagcagcaggtcacaggggagaggcctgggtggcccctgggagtggacaggcccttgtctccgctgaagtcagggaggtaccctttgctgctatgacaaatggccgcagacacagtggctgaaaacagcacccgttcattctctcccatgcctggaggagagaagtctgacatgggcctccctgggctaaaatcatgatgtgggcagggctgttccttctggaggctcccggagacagtccattcctttcctctcccagcgtctagaggtgtccgcatccctcggcttggggcccttcctcccccttcacagccacagcgcagcgttttccaggccttgactctcaccctctggcctcctcccatgaggaggctgtgaggacattccgcctcccggatcatcccctatctcaagatgcctaactcagtcccatccgcaaagcccctgttgccatggaaggtgaaatagtcccagggtctgggggttaggatggggacatctttgggaaccattgttctgctgcccacagctgcgtggagggattccggtcctcgggttcagttggtgacagtgtcgggtaggcctgggcaggtgggagaggtcgtgaagccctttgcagggcacttggccgctcatctggcacaggggaagaggcgcagcccgtggcccggcagtccaggacctgctgttcccttcctacccggggcggggcctgtgggaagatatggaagtcgggtgaatgagccgtgcccagtgattttaaaaagcagattaaaataacatagaaaatgtcagagctcattgcgtgctctagggcatttgtgaaacttgcattatttatttttttgagacagggtctcgctctgtcgcccaggctgcagccttgaactcctgggctcatgcgatcctcctgaggagctgggaccacaggcacatgctaccacacccggctaagtgttttgttttgttttgtttttgagacggagtctggctctgttgcccaggctggggtgcagtggcacgatctcggctcgctgcaagctccacctcctgggttcacgccattctcctgcctcagcctcccgagtagctgggactgcaggcgcccgccaccacgcctggctaattttttgtatttttagtagagacggggtttcactgtgttagccaggatggtccgatctcctgaccttgtgatccacccgcctcggcctcccaaagtgctgggattacaggcgtgagccaccgcgcctggcctaagttttaaattttttgtagagacagagtctcactatgttggccaggctgttgagactcctggcctcaagtgatcctccctcatcatcctcccaaagtgctggcattacaggtgtgagccactgtactacttggtgttatttaaaagtcctggtgaattgtaaaaagtgtacaacttcgggaggccgaggtgggtggattacaaggttaggagttcgagaccagcttggccagcatggtgaaaccccgtctctactaaaaatacaaaaaattagccgggcatggtggcgggcgcctgtagtcccagctattcgggaggctgaggcaggagaattgcttgaacccggcaggcggaggttgcagtgagccgagatcgtgccactgcactccagcctgggtgacagagcgagagtccgtctcaaaaaaaaaaaaaaaagtacaacaaaaccagggccccagggggcgagctcctctgccctggaggttgggcctgccgaggggaccttagagtgcttctgaagtgagagttggcattagctgagcagaaggaagcagagggcagcctgagctgagagccagcaccggtggagctctgagacgagggctcgcaggcctgggcacccaccgagccccaggtgtgccaagtccagtgggagctgcaggtcaggttgtgaaagtccttttttttccctagacgtagtcttgctctgtcacccaggttggagtgcgtgcaatggcatgatctcggctcactgtaacctctacctcccaggttcaagtgattctcaagcctcagcctcctgagtagctgggattacaggtgcacatcaccacgcccggctaatttttgtgtttgtagtagagacggggtttcaccatgttgaccaggctggtcttgaacccctgacctcagctgatctgcctgcctcggcctcccaaagtgctgggattccagatgtcagccacctcgccccgccatgaaagtcttgatattggccggcgtggtggcttatgcctgtaatcccagtactttgggaacccaaggcaggaggatcacttgaggccaggagctcgagaccagcctggacgctatagtgagaccctgtctcttaaaaaaaataaaaataaaaaagtcttggtgtcacatccaaagtttggagttctgttccgcatccatcctacaagtatctgagcgtctttgtgtccaggactaagttcaacgcctgggctgtgccttggcccctgtgcggtcgcagcccctgcccccctctctccccgtgctctgcctcttggtgttgggaggtgggggaaaaactgggtgcattttctgcacttttccccttggaggaagcaaaacttcttgaaaatctctcagtaggtgtctgcgtcttaaggcctccagaagcttctttggtttcatttgactgttcacggatactcccgctgccttggcccgtagattttaggagctaagcttaaaatgggccctcattggaaaacttgactgggtaaagtgcttatagttacggatttttgtcttgttaaaaattgacaagaatgtggaaaatctgaataaaggcaagcgtcctcgggctgcgtacagctggtgggagtcgaatttagaattaaaacttgagcgtgccatcagtttagttaatcatgcttttatttgcatgttttaggaaccatcactgttgctggaggcacctgacaaatcctagcgaatttttggagcatctccacccaggaacctcgccatccagaagtaagtaacacgggcctggcccccaggtggccccacaggaccagggaccggaaggctgtggcctcttccctgggtggcccgccagggagaaggtggtggcctgaccggctctgaattcccgggacgtccaggcgcaagctgtgcttagacgggagcctgcgggccatggtagggaggttcttctgcaagtttcttcatgaagcctgtctgctttgggcttgcatctcgcccttcggcatcgaaccacccgactctcacttctagaaactggaaaagctgtggctcctcctgcatttcgggtgacactggggtttcccaggacccactaccctgtctgcatcggccctggggacacctgagctcaaggggcgttcccccacacactgtcagaagtggggagcagttagagcagggctctctaaaaatgggagactcatttttaaatgcctttgaggtagttccatggcccagccgccccgggtttagttccttttcttgtgcctttcttataagccggtggcacaaagaggtgcctctggtggcagcccagggggaccactcaggagaagagagagaatgacctcatcccttctggccacacccacagggcccgggtgacccagtggagggtgtcaagtgtgggatgagcagtgcagtgtcctcccgtcaaggcagaggtggcagtggcagcggcggccggcagagcaccggggaaaggctgccttgtgcggcgtcgcccttggattgtgtgccgcttccctgtgcagagggaggaaggggcccatccagggccccctgtagctaatgagggcgagtgtggacttgagctggggcccttgagtcatttgtgggtgccttttctgttctactacgattaggaccttgaggagggtggtggagcccagcctcttttgggaagtcataaagtgtaagggaagaggctctggtcacgtggttggcaaactatggcccctggacccaatctgaccccctgtttttataaataaagttttattggcacatggctgtgtccatttgcctgagcattgtccctggttgccttctcctcacagtgggagaagtgactagctggaacagagggcgtggcctgcgcatctggagatatttcctgtttgggcctgtgcagaaaaccatgcgcctcctcttgtccaggttaacttactgctggctggagcaggatggacgagtctcttggtgacttggtttggaaattggcaggtctgtctgtgcctcctgaaatcttgcttttacccttcaagtttgtgcttccttacaagatggtcaattttctaaaactcagctgttttctttgtacccaaattaacacagcatgaaccaagtaagcaacttgctctgtcagttagctttattatttatttatttatttttattttttttgagacagagtctccctctgtcacccaggctggagtgcagtggcgtgatctcagctcactgcaagctccgcctcccgggttcacgccattctcctgcctcagcctccctagtagctgggactacacgagcctgccaccacgcccggctaattttttgtattttcagtagagatggggtttcaccgtgttagccaggatggtctccatttcctgactcgtgatccgcccaccttggcctcccaaagtgctgggattacaggcgtgagccactgtgcccagccagttagctttatttttttgaggcagggtctcactctgtcacccaggctggagtgcagtggtgtgatcatagctcactgcagcctccacctcctgggctcaagggatcctcccgcctcagcctcctgagtagccgggactacaggcatgcacaccacacctggctaatttttttattttttgtagaggctatgttgcccaggctggtctcaaattcctggcctcaaatgatcctcccacctcaacctcccaatgtgctggggtcacaggcgtgagtcacctcatcctgccgaagttcaccacatagcccttgataaacccactttatatctgaaggtgctgagtgcagcaaccaggaggtgctagaaagtcctcggggagagcacaggagacaggagtaagggagcagggctcctgcttccgaaggcctggagctgaaggagaggaggagctcagggcaaaccatgtgggcttgctgtggtttggcaggtccccagataggctgccttcactttgtaaaagttaacttttactgagaggaaattcacatacatcatattcactctttaaaggatacagtttggaggtcgttggtgcactcacagggctgggcagcatcaccactcattccggagcatctcattgtcccagaggaagctctgtccccctcagcagttgctcttcatcctgtcccccacaccccaaaaccaggcatctccttcctgcctctgtggactggcctgtcctggacatctcatagaaatgggatcgcgcactgtgtggccttttgtgcctggagtctctcactgagtggcccatcctcagagttcatccactccgtggcctgcgtcagagccttgctccatttcatggctgagtcgcgttctgctgtgtgtggtgccgggcgacctgctcccctgctgatgggcgctcatgtggcctcctctctggctattgggagtcgtgctgctgtggacattggtgtgcaggtgttggtgtggacgttggtgtgcaggtgttggtgtggacgttggtgtgcaggtgctggtgtggacgttggtgtgcaggtgttggtgtgggtgttggtgtggatgttggtgtgcaggtgttggtgtgggtgttggtgtgcaggtgctggtgtgggtgttggtgtgggtgttggtgtgcaggtgctggtgtggatgttggtgtgggtgttggtgtgcacgtattggtgtgcaggtgttggtgtggatgttggtgtggacattggtgtgcaggtgttggtgtgggtgttggtgtggacgttggcgtgcaggtgttggtgtgggtgttggtgtgcaggtgttggtgtggacattggtgtgcaggtgctggtgtggatgttggtgtgcaggtgctggtgtggacgttggtgtgcgggtgttggtgtgcgtgttggtgtgcaggtgtgggtgttggtgttggtgtgcaggtgttggtgtggatgttggtgtgggtgttggtgtgcacgtattggtgtgcaggtgttggtgtgcaggtattggtgtggatgttggtgtgcaggtgttggtgtgcgggtgttggtgtgggtgttcgtgtgggggtgttggtgtacaggtgtttgtgtggacgttggtgtgcaggtgttggcgtggatgttggtgtgcaggtgttggtgtgggtgttggtgtgcaggtggtgtgcaggtgtgggtgttggtgtgggtgttggtgtgcaggtattggtgtggacagtggtgtgcaggtgctggtgtggacgttggtgtgcaggtgctgctgtggacggtgtgcagatgttggtgtggacgttggtgtgcaggtgtcggtgtgggtgtgcaggtgttggtgtgcaggtgttagtgtgcaggtgttggtgtggatgttggtgtgggtgttggtgtgcaggtgttagtgtgcaggtgttagtgtgcaggtgttggtgtggatgttggtgtgcaggtgctgctgtggacggtgtgcaggtgttggtgtggacgttggtgtgcaggtgtcggtgtgggtgttggtgtgcaggtgttggtgtggatgttggtgtgcaggtgttagtgtgcaggtgttagtgtgcaggtgttggtgtggatgttggtgtgcaggtgttggtgtggatgttggtgtgggtgttggtgtgcaggtgttggtgtggatattggtgtgcaggtgttagtgtgcaggtgttgttgatgttggtgtgggtgttggtgtacaggtgttggtatgcagatggtgtagatgttggtgtgcaggtgttggtgtgggtgttggtgtgcaggtgttggtgtgtaggtgttggtgtgcaggtgctgctgtggacatgcgtttttgtttcccttgggccgacacatgggtgtggaatcgcgggtccaagggtacattctgtttagccttctcaggaatcgcctgcccgtctccacggcggctgcacccttcaacattcccaccagccgtgcatgagggctgcctctggtcttggaaaagactctcggaatagttgctcactttctccatttcgaccctggagccgtcgcttggtgcccagaggaagccaggccgcgggcgctgggggaagggggtcccactgcagctgcaagtcggcctctcctcctgcctgcttcccgtgcctcggctgttggcttatttgagtattgaatcgtaatggtttcttcctcctaaatagaatgctaggtttccttgttcaggcctcgtaacttttcctgacctgtaaaaaagcacaccttgaacacttcgctttctgtctgtgcacacggataggtgtcagctgggggctgatagaaaacatccctgactggccgggtgtggtggctcacgcctgtcataccagcactttgggaggctgaggcaggcggatcacctgaggtcaggagttcaagaccagcctggttaacatggtgaaactccgtctcaactaaaaatacaaaaattagccggacgtggtggcgtgtgcctacaatcccagctactcgggggctgaggcaggagaattgcttgaacctgggggcagaggttgcagtgagctgagatcgcaccactgcactccacctgggcgacagagtgaaactgtctcaaaaaaaaaaaaaaaagaaagaaaacacccctggctgcaggcttcgggcggccctgtgtcctccagctcttggggtggggccactctgacatcatgtgctgttttggggagtgtcatgaccaggagggcatcttttgttttttcttttaattaaaacaaatactaggctgggcatggcagctcatgcctgtaaccccagcactttgggaggccaaggcgggtggccttgattgcttgaggccagaagttcaagaccagcctgggcagcatggtgagacctggtctctacaaaacaaatacagaaagtactgggtgtggtggcatgtacctgtggggcgggaggatggcttgagcccgggagttccaggctgcagtgagctgtgattgtgccaccgcactccagcctgggcgatacagcaagaccctgtttcaaaaaataaaataaaaaacaaacactgaaggaaaagagtagatagagtgcaggcctggcacaggttttttttttttttttttttgagacagtctcgctctgttgccagactggagtgcagtggcgtgatcttggctcactggaacctctgccccaggttcaagcaattttcctgcctcagcctcccgagtagctgggattacaggagcgtgccaccatgcccggctaatttttgtatttttttagtagagacagggtttcacggtgttggccaggatggtcttgatctgttgacctcgtgatctgcctgcctcgtcctcccaaagtgttgggattacaggcgtgagccaccatatccagccagatttttaatttaagagacttggcacgcattttttgtttgcctctgtctgctttccgtaggcccccaagcaggggcaatgtgtgatcgtccgtttgttttctcctctgcagtttgggggtccttgggtagaaggactgagcattgagcttggatcaaactgttggttttatggacagagtcaagtggcccggaggtggtgacttgggccatgttccttgtgagggttttgtctgtggctcattcattcagcacaggcgggccctgtggccaggtgctgatagtcctatgttccctctgagagtgtggccctggtccctcatctcctggggatcagtggtagggccaggcctggccccaggtgctctgggtcttgtgcctgtccttcctcacaccacctctcttgggtacgtagggcacagggcacaggacctccgcccgagggccaccgtgctgaggtgtggctcacatctcgtggcttcatcttgaggctggtccgtctgcttgtctcaccacacttaggcctgagtgtctgaagaagtaatgagctgcaaacctcatgacctggaaatcccacctgtcagagcccaggcctcaggaggaggcaactgaggacattgggagtgccagcaactggagcccacttccacctgcctcacttaggccactggccacccccacggatggtcccgggagttagctctgtgaccatgcgcggctgttcctgctccacctcttggagtgccgcctctgtctgttggtgttgcaggggagctgggttgggagagctcactcccttgtctgattttctggaaactgtgctcctgtctgagtgagcgcaggcagaggtgctcagtttacccgaggtgtgccgggcaggagtgctctccaggtgggggggcttggagggatgtgggggttggtactttttttttttgaagttttaatttgtagtttttatgggtacaaggtatgcttatttctttgcatggtacatttcccacatggcagtcgtggtggactgaatgatggtccccatggatgtccacatcttaatccctggaacccatgaatatattaccttaaatgacaaaagggacttttcgcgggtgggactgagtgaaggaccctgagctgggagatgaccctggatgatctggggagcccgatgtcctcaccgggtcctcatgagaggaggcaggagggtgagagtcagagagaggctggaagaggctgtgctgtggctgcggaggtggaggaagggccttgagctgagggaacctggcacgcgctggtgctctctggagtaggacgaagcagagaacgttctcgtgccaaggttttctctttcctgcctgagggccctttatgtagatcagaccagagacaagtgaatcccggtcttgccaggggaggcatttggagctgctcgtgggacgtggtgatgcggtgccaggccacatgcccggggctggggccgagtggcgttctcgtgctgcctctgtggccaggtttcacttgggaacctggctgcatcgcgggttcctcctgggccttctggtggcttggggctcctctgtcctcggtccctgctgggaaccgtgctttggcagcaggaaccagcgagatggcagcacaggggctggaggccggctgggactcactggggccgcatggggcttcacctgatgcccagccctcctgggacagggaccagtgggagcaggaggtgggacaagaggacgagggctcgagggagcccccacacttcctacccacagaggagggcctgatacttttcaaaaaccatgcactgtctttttgaatttttttttttttttttttttttttgagacagggtctcactctgtccctggctggagtacagtggtgcagtctgggctcactgcagcctcgatctcctgtgctcaaggaatcctcctgcctcagcctctaagtagctgggtgtgcaccaccacgcctggctgatttttaaattttttgtagagatggggtctcgctatgttcaggctcatcctgaacatctagccccaagtgatcacccaccttggcctcccacagtgctggggtcacaggcgtgagcccctgcccctggccttcttatttttaaaccgattctttgtcatcagtttctgcgtgtggccgctgagagccatcacctggctgtttcttgggtgtcccttgcgcccacacccctgcatcctgccccaccttcaagttcttccatcccagagtggactctggggtcaaggagagtcctcagatcttggggacatgggcagttgtggggcctggggtcatgtggacaggatgccggcccagccccagcagtgccagtgcaggtggggtgaaggcctgatggggtcagccagactgtccccacctgaagccccctgccaagcccctgcatctgaagactgaagagtgagggtggcagcccgggagggtatccttgggcccagtgtgtcagcgatcaggagagcagcccaggctggagcgtgcggccctgctcagccgggccggaagcgtccctcacttgttcctcccccaggttgcagaggagctgtccaggacagccggggtggggccgcccataagatgcagctgctggtcccatgtcatggtcacagcaggagggctgaggagccaggcctggcccgtggtgtgcagggtccctggaacaaacagctgccctaaaaaaaaaaaaggctttaaggccaggtgcagtggctcatgcctgtaattccagcactttgggaggccgaggtgggtggatcatgaggtcaggagttggagaccagcctgaccaacatggtgaaacctcgtcctactaaaaatacaaaaattagctggacatggtggggagtgcctgtaatcccagctactcagaaggctcaagcaggagaattgcttgaacccgggaaacggaggtttcagtgagctgagatcgcgccactgcacttcagcctgactgacaagagcgagactccgtctcaaaaaacaaaaacaaaaaggctttattgagatacaatttgcgaaccatacaagtcacccatttgaagcatgtcattcagtggtgtgtagtttactcagaaggctgctcttgggcctcaaaatgagtagaggggagaaagggaccctttttttgttgttagagattttgagagctgggttgggttaagcggctttcatggtaagctggaggcccaagcctgtcttgagccccgaataaagaagaaacctaggggtggggcgtggtggctcacgcctataatcccagcactttgggaggccgagatgaggggatcgctaagcccaggagtttgccctggtctcccagcttcctctgcggtgccccagccaggagcagctgtagactctgtggaccgtatgtgaaatgaacccacagggttcccgtgctaaaaccatggagagtcttcaggtggggccagccgggccttaaactgtgtatctaactgagtggggcctggggtacccatgggggttgcatgccctggaagccagccctgcctgccatccacttcccacagccagagagagctttctagaaatttcggttggatcgtgtctccttgctctgaaccacctgtcggcttcccgtccaaccccacaggagggcaggctccttccagcccagcccccagggcccaccctggtctagcctcgatcctgccgcctcctctgcgctccctgccatccggcctctggggccttagctcttccctggcttcgctgggtccttccctttgcctagactttcctcctgccctggaccgcccagaacttgcacccctgcgtgtttgacaatcacttccagacgcagccccgctgccacccagacctctctggtcccaaaccaacttcatttgtctttttccttttttttaaatttatttatttattttattttacttattaattttttttgagacagagtttcactcgttgcccaggctggagtgcaatggcactatctcggctcaatgcaacctctgcctcctgggttcaggcagttgtcctgcctcagtctcccaagtagctgggattacaggcgcatgccaccacacccagctaatgtttgtatttttagtagagatgggagtttcaccatgttggccatgtcttgagccccgaataaagaagaaacccagggacagggcgtggtggctcacacctataatcccagcactttgggaggccgaggtgaggatcgctaagcccaggagtttgccctggtctcccagcttcctctgcggtcccccagccaggagcagctgtagaatctgcagaccctatgtgtgcggcctcccaaagtgctgggattacaggcgtgagccaccacgcccagccttaaaatgtttttgagatgatctggctctgttgcctgggctggagtgtagtgatgtgatcacagctcactgcggcctcaaactcctgagctcaatcgagtgtcccacttcagcctcccagagcactgggaccacaggtgtgtgctgcagtgtctggccttcatttgtcttcgaaactcttgctcgcccctctgtgacgttgttaattagtagtcttccagattgggccccgtctcgtcccagaaccgaaactctgcctggcacgtggtggggcctgcacatttgctcagcggaggaggattctggggccctgggttcccgaggctggcaagttggctcagagctgcccttgggatgggtcagggtggggtaggctgggggcagcacagagtgggcacaaggcagttttgtggttttgaaattgagtttgtatcaagagctttactgcttttgtaaaaacttactggcatggtaccaagagaaattcaaacaatagttggtaataaaatccctccctacccctgccctggtgtccccataggagctgactgccgccccctttctgcagcattagctattgtctagaatcttctacaaggatggggcagggcggtgggagcagggcccgagggtcccagttgttgggaactatgttggcctggctccagccagctcacaccacggggcagccgaggcctcctttggcccagctgaggccttcacggcaccccgaggcccagagtcccgtgagcgggagacagagaaaggggtctccaaggaagggtgggcctggcagcagcactatgagcagcggcaggtgcagggtgccaccaggcagaggccggcagaggcagaagccggtacggttgccctgcgtctgtttccacatctgtgtatttgtgccagggctgctaaacatgcacagcaggcactgtggcgcccaccccaaatcacaggaaggatgtgtctctctgtgaccgtgaagcccaccaccactccatagtgttggctcacacccggctgtttcccacgcctccccgcgtgtccccaagacaaaaggtctgggatgaagctgccgtttgcatggctggggatgtctccttgtcctctctcagctgagaagagtgccagtttcctctcttcttttgcgagttcaggagagcattattctttcttctttccatcattcttcctccctccctttcttctctctcttttcagtttttttttttttttttgagacggagtttctcgtcacccaggctggagtgcaatggcgcaatcttggctcactgcaacctctgcctcccgggttcaagcaattctcttgcctcagcctcctgagtagctggggttacaggcacccaccaccacacccggctaattttcatatttttgagtagagatggggttcatggtgctggccaggctggtcacgaactcctgacctcaggcagtctgcccaccttggcctcacaaagtgctgggattacaggcgtgagccaccgcacccagccttctttttaatttttttgctaagagctttattagatataatttgcacactcatttgttcacccatttaaagtgtccagttccacagttttcagtatattcaaaaacttgtgcaactatcatcacaatttgatttttattcatttactttttagagacagggtcttgctctgttgcccagaggctggagtgcaggggtgcagtcatagctcactgcagcctcgaaatcctggcctcaagtgatactcctgcctcagctttttgagtagttggcaggcacgcaccaccatgcctggctaattttttattttaatttttagtagagatggggtctccctacgttgcctaggctggtctcgaactcctgggctagagcacccctcccgcctcagccccccagagttctgggattacaggtgcgagccactgcactggccacagtcagtggagaacattggcatcccctacagagaagccctgtagcctggggtgtaacacacggccttttgtgtctggcttctctcactgtgatgtcctcaaggttcctccatgtggcgcctgtgtcagagcctcgttgcttttcatggctgtgtcgtattccaccgcatggatgggccatgttgtgttgattcattcttctgttggtggacacctgggtcgtttccacctttggctgttgggaattgtgcttctgcagacgtggtgtacacgtttctgtgtggatggatgttttcatttctcttgggcagatacgcaggagtggaattgctgggtcaagtgtgatttatgtgtgacatttccaggagctgccaagctgtcttgcagagcagctgtcccacgtcaccgtcctgccagcctgtgttcgagggccccaatttctccacatccctgcccacagtgtcaccgtctgtcattctgattctgccatcctggtgggagtgaggtggtggctcattgtggttctgatttgcatttccctggtgctgagtgctgctgggcaccttttcacgtgcttgttggccatttgtctactttggagagctgtctgcccaagtccttggcctgttttttgctggttttttagacatggtttcgctcctgtagcccaggctggaaggctggagtgcagtggtgcaatcttggctcactgcaacctctgccttcccagctcaagcgattctcctgcctcaccctcccaagtagctgggagtacaggtgcagaccgccacacctggctaatttttgtattttttatagagacggagtctcactatgttgcttatgctgatgtcaaactcctggcctcaagtgatcttcctgccttggcctcccaaagtgctgggattacaggcatgagccaccgcgcccaccagccttggcccatttttactgggctgtttgtctttgcctctgagttgagagccccattccttggcgtggcgccgttgtgagcatgttgctgttgccgggcagctcctctggctcttccagggtgtctgatgcccccgagtcatcctgtgtcctctgtctgccacattcctggtgacctggaaggtcagtcacaggactgcatttcagtaaattccctcttccctgtttagctgtgttgcacgtgcgtcaaggttatggcgcgtggggattgtggaccattttagttttctctgtatgatttacttcctaagcatgtcatttccaaaggcacaaatggctgggcatgatggctcatccctgtaatgccaatactttgggaggccaaggcgggaggatcatttcaggccaggcgtttattagcagccagggcaacatggcaagaccccgtctctacaaaaagtacaaaaattagccaggtgtggtggcacacacctgtggtcccagctagttgggaggctgaggcgggaggatggcttgagcccaggaggttgaggctgcagtgaaccgtgaccgtgccactgcactccagcctgggcgacagagccagatgctgtctcaaaaaacaatagtttcttaaaaagtgcaccaagttgcccctagggggcggtggtgggtgaagtgcctgagtccctgtgctgagagtggctcccggtgtcacggctccaccttccagatggaagggctgtctgggtctccccagcgtgggttttgatgcgtaacctgccatgggcttttgtcacctgacactgcagggtgtgctgctggcagctgtggccacgtgctttccagacgagcccccgcaaccccacgaggtgtggggagcccccctttttattatttatttatttatctattttttgagacaggatcactgtcacccaggctggagtgcagtggcgcaatcacagctcactgaagcctcgacctcccaggctagagtgatcctcctgcctctacctcccatgtagctgggaccacaggtgtgtgccaccgtgcctagcgctttcctgtcgtacagagcacaagtttgaggcatcccttgggccgtccagccctgccccaggccctgtccttcctgggcccagctggtctgggggacatgagagtgtggcaggccccatactgcataggtcaccctgtggccagtcctgtggggcaggtgggctttgatgacctggaggtcagagcctgcagaggggggtgggccagcccctcacatgactcttacttgagggcttcctgggagctgatggcccttgcagtgggttacagggaggcaggaagaggccatgtgtgcaccggcctgcagagaggcagccagggacaggggctgctgggtgcacgagggtcccagcgcctccaccagctgccaaagcgcagggggagactcatgcggtcatggcagtgccctggcatagcatgcagcccagctgtgtgccgtgtggcctaggcccacaactgcccctcgtgggcctctgtgcctcctcaataagctcagtcgaccatgtcatcatctgtgatgcacagagcagggccagggacccgggaagtgctgatgtggggaccactgtggccaccaccgcatctgggcactgtttgtggcagatccagggatggcctcaggcctttggcccggcctctgagggctggggaccagtaggaggcctgaggtgaccgcgttctgccacccagtcctcccagagggctgccctgacaggtgccttggcagctcccatcgtggctactggcccagctcaggccggcactgagggtcccacagtggtccagctgcggcctctgctccctctgagccggtggctccctggggacagtgcgcaggccctgggtgaacactacatggccacatctgggtgagagcgggagggcaggtgcagcgttggggggatcctggggcctgtggggttggcggggtcgcaggtgaggattgggtactgggacctggctgtgggcgaggggcccgctgggacagtgtggtggcctgggaggccccgcgcagtcagaggctggtctctgggcacaggcagctctggtgactgtgacaggtgccttgccttgacacacactgtgaccgtctagtctacatttctaggctgcacgtggtcacgtgccgtgcacggtgcacttggggcctcctgtgcagacactggctttgcggctgccccatgggagaagctgcgaggactctgcacagagcaagggtggcgggcagggcctcagcccacgtgggcttggagctgtgcggttttgtcaaacccagtgggggtctctcagcagcagcccagcgcggggtgtgacgtcagggctggggctcagcgctgggtatcagccctgtgtgctgcaggcagggtatggggtggacccaaggcagtaggtggaggccagggggcgacctcggctttgcttttgtcaggatggagggttctggacaccagtgcaagcctagctggggcctccctgccgtcctgctcagattcctgggtgcatgctgccctctagtgcccgcagtggggagtgccttcaggagcgggtggctgcaccttggtggctgggaaccccactcccgggactgtctgggcggctccctgccttgtttccttcacactctagatcactttgggggtcacagcgtggggaggtggattttgttaagttttttctaagtttttgggtttgtgtggacttgggtccttgtttccgaatcctagagggattctgtcgtctttctgcctttggagattgaacctgccaaggaggacccttccccagagtctgtgatcaaagtcccttcctggtcggggtgggctaccagttcccaccctgcaacacctgggacaggagggagccgctcccgcccgcagcctccgtggagaggacagtctgactccgatgtttccaggcgggtgccgtcagtgaatcacttggcctggtgcaatcccccattctgtacagggctggtgggctggtttatgacccgcgtgactctgggcagctatgatggcaggaaatgagccgtcttgggcgggcctgctgctctcctgggtcaaggttcctgctagggcctgagttctgctggcagcagccagccagccccccgtgacccacaggcctgctccgaggggtgggtccccctgcccttgagcgtgtgaccctcacccatggccgccctcaccttcgaaaacccgcagatgccgcggtctctcgtgcggatcaggctcagagcagagagactgatgtgcagcggacgctgacacacctgtggcgtccctgatacgtaaacctttctctccgaggccccgcttaaaattagcgcactggctcccggtgtcgcctcggccttagaaactaggacgcctctgcttctcgttagctgcagccctcgtgccttttatgctcagcagagtgacgaggccgctcgtggttttctcttctgccctcactcagccgcgagggcccagccgcctttgtcctcctggtggccacggtatttttagcacgctccgttctgagggaggacgggctccaagggctgggcatggcggcaccgctggttcaccctctctcgtcttcctccacaggtgtgcttcccgcacagctgcagccatggggtctgaggaccacggcgcccagaaccccagctgtaaaatcatgacgtttcgcccaaccatggaagaatttaaagacttcaacaaatacgtggcctacatagagtcgcagggagcccaccgggcgggcctggccaaggtgggtgacatcctggccccagcgcggccctccatcagcctgcgccgcgggcctgcggacatcctgggtcccagctcagccagccccacaggcgtggcctgtgcacgtggaatgtgtttcggggccactcccagctcgtttaccagcgcctgtttgtggagttccaacaatgtgccaggcaccattctaggcactggagttgagaagtggccggtgcaggccctggctccagggagctggcagggggtggtgaggacacacagccacactgcagtgaagcccaggggcagtgggccaccaggttgttctggccgtgagctgacgtctcactgagggacgccttccaggggtgttcagtgcccaggaaggccttactttcctagtaaaactttttttttttaagctgggtatggtggtgcatgcctgtggtcccagctatttgggagggtgaggcaggaggattgcttgagcccaggaattagaggctgcaatgagctatgaccgtgctactgcgctcctgccccggcagcagagcaagaccctgtctcaaaaaccaagtcagaccacaccagaaacaatctttttgagatggcagagtgactgggtcaggaaaactcaaacagggcgacagcgcaggtacatagtgaccaggagcctcctccctgtcccgacccagtcccccaccctctccctggaagcagcactgttattggttcttctctctctctctctcggcatattgtgcacgcgtgtacgtgaatacacacagcagacccccgaaccccacatgctgagtatgtacagtaccattctgctcgtctgggcatggtggcccaggcctgtaatcccagcattttgggaggctgaggcagggggattgcttgaggccaggagttcaagaccaagctggccaacacagtgagatcccatctctactaaaaatacaaaaatgagccaggcgtggtgttggtacatgtctgtggtcccagctactcgggaggctgaggcgggaggatcacttgagccagggaggttgaggctgcagtgagctgagattgcaccactgcactccagcctggacgacagaggaagattctgtctcacaaaacaaaacaaacttaaaagttggtgctgcacgtttcacggctctgaaggtggctgccgtggtccgtgagtctctgtgttcgggtgtgggcctgttcgagcagtgctcacccctcagtttggaagatgaatcgtcgttgcattttgggttcttccagttgcctgctgtttgactatcgctgttcttcctcagttaggccaggggttggcgggcagtctctacacacggccagagggtgaacgcctaggctctgtgagccagaaagagcaaccagacgccgtgtgaatgaaagtgcacggccctgtgccaatacaacattattcctggatgctggagggcaaacgcgtattgttttcacgtcttctgcttttttcttttcccccaaccacttaaaaatgaaaacaaacaaacaaaagccttcataactcaaaggctatacagaagcaggaaggggctgattcggcccgagggccgcagtttgctgagcgctgaggcctcctgcctttccgggccgcctccaccctgcccctccctccactccctggttttggtggattttgtcagtagccttcgtctctctcctagtgatccttcggtatcagactcgcattgttatttctttgtctctgagctgtagagcgagggaagcagtctcgcaccatcttttcttcccctccaagatggatgttttttctgttttgagagggggtctggctctgtcgcccaggctggggtgctggggtgcagtgctgcgatcacggctcactgcagccttgacctcctgggctcaagcagtcctccagcctcagcttcccgagtagctgggaccacaggtgtgcaccaccaagctggatttttgattgtaacacaccatgacgatgtgggaatgatggcacatctgtgtccgggtcagaacggtgggggctgctgccgtcccggcttcagttctgtctttaaaaggctttggtcctcctatctcatctcagaccgtcttctctggccctctaggccacaggctgctatcccaggaaaggcccaggtcctcctcttcctcctctccctggtgcacatagggcaggtgggacaggcgtcgcctccctttatcctggcaccgcatctgcctctgtctcctgcccttgacctacttccacatttcccaggatgcagcagccctttctggcttgggatccaaggcgtcctgatgtcaggacgttgaggggaatcagcatctcagaccgccctgcgctcttccgaggtgcctttaaatgcccgccccgtcacttcttcctcatccctcacctcccaccgggctccatgccccggtgtttccggctctctctgccctccacgtggcggccttgggtgcagcctgggttcccgggtggcctgtcctcccccgcgctggcacctccgcttcgtccctccctccctctgcctccttggctgccgcctctttgagccctcatgtcgctgcttcaggtttctgcactccccccaggccagttcccccgagattcttggcaccggcgtcttaagccagtgtggggagtatggtttccctgccttgcgttctgcgtgttccttcccatgcctctgcagcggcagctcccatgctgcttctccttgcaccagtgcagagaatcctttctcaaacccgtggagggggctgggcagtagggggccgtccgggtcccatgctgtggaggggctgtgtgtgcacgtgtctctgtgtgtgtgtgtgtgtgcgcgcgcgcgcgcgcctgcgcgcacaggagactgaggtggggaggcagctctcacacagcccagagagcttggcagctgcagagtcacgttggcacccgcatgtggcacacgcacacccccttctgcagctctgtggggacagatgggctcagggaagcatctgctctggccctgggcagccctgcgtcttccaaatggggggcccttggctcggggcagccagcctctttggagaaggagcacagtgccctgctggttctgagcgagctgtgggggtgttggggtccccctctcaccctggtctgcctgccttgaccactgtgtgtgtgcgtgcatgtatgtgtgtggtgggggagctgggggtttcctggttccatcaaaactgtgtttggttatacatcgcccctgcccccagcagagatctgcaggcccgatggagctcggtgggggcgggagctgcgggcacagccctgagagggccctggagctggcggtgccctgggtgcaggaagccttccactggagttgctgggccctccacacggggtgtccccgaccacttgggaagcactgaggtgagaggagccctggaaggccccgtcgggggtcctgttgggaggggtgggaacttccagtgcccctccacccccaccagctgcctcccaggcgggtgccagcaggggaggccctggctgccctcagctataccacccgccggcatctgcctctcactgttggcatgtggccggtcgccttcctggcctcagctgaatctggccccccaggagccccgtgtgaggcactttcaggggccgccggaggcctggaagacccgagtgtggcagtaggaatgtcccgagcggctttcagtgcctccttttcaaccctccccgcctggagccctccttctggatttgcgtctcggcagattgtgggatgtcacttctgtcctcttccgccctgcgggattttcccagagccttcgggtttgagcccagctggaagtggccctcgttcacgctgcctgtcagcacctgcctgggctgtgtcacctagagtgtggctccgtgtgtgcggcgcagacaccgtgggggtgtttggagcttcctgcgtggctcccagatgtctttactacacagtgcccgccgtggaagggacagatgagcaatgtagcccgaggcgttctttcaagagcagaggaatcgggagcgaagtgtttttgttcatttagcagactaggatcatgggcgagtttcctctaatagcactgaagaggcgaattcacggcttcccctcggccagcggctttggcgtggatttggagccgggccaggttcatggaaccctcctgcagaagcagactggggcttcctggagaggggggacagtgtctgtgtgattcagagcagtgctggcctgtgggtctctgaccataccactcagttctctgtagtaacatctcgtgtctgggacacaggcccttttgtttctgtttctcgcctttccactcctcaatgtcttcgtgtctcactgactcttcagctgctcccctgaaatctaagagaacggcagccccgcagctgccccagcaccctgccatcacacagcctgtgccagggacaggtgccccaggcgccttttgcactgtggccatagtggacatggagagtctccagaaagagccggcgctaagctggactgtcctttccttgggaccggcctcatcttggtttaactctaaattagtgtttctcttcgcttggcactgtggacttggggccgcatcgttctctggggtggcgccatcctgggcattgcagggtgctgagcagcttccctggcctccatctacctcatgccaggagcaccctcagtcgtgaaagccacagacatccccagacatggccaggtgtcccctgggggacaagaccccccctcagttgagagccacctgctcgctgcggctgctgctgctgttactgcttttgctaaagaaacctgtgcatgccggccacggaggcagcaccttcctgtcgttaacaggcacctggaggataagtgttttcattgccaagcaaaacagtttcttcactgatgtgatcgctgggtccttggggacagtaaatggattttagccgttctggaagctgccagcgatgcaggcgtcaacacacagctcttcccttggtggcccggggcgcggaggggcagcttgccagattcctggcagatgagccgaagcgggtgggttagttccttctccctgtgcagtgggtggcccggtcgactcctggaaggaggcgtggggcctgcagtgcccaccccaggactgggtgtggcagccccggagcggctgggagggcctgcacagaagggtgcctggcacccagaaggcccgtggtgcccaccggcagtctagaatctggtcttgtcggcccataggctcacccccaccagaggagggaacatgaggctggggacaaggccaggagcccagggtgaggcgtgtactccggatagccctggtccctcagctcctggatgtctccagaaagagccggcgctaacctggactgtcctttccttgggaccagccttgtctcggtttaactctaaattagtgaaggcaccgggttccggctgcagtgccgcctctgacaggtgctggtccttgtcttcctctgctgtcttctccgcgtgttccagtgtctgaggtggcccaggacctctctggggtggaagtccacgtggccgccaggctagaggtcctgggccatagtctgtctgctcaccccagggtgccccgggctgtgttgtggatcgctgtgtgcctcagtttcttcagcggtcagatgggagctctgccattcctcccacccaggagatgggtgcgctgggccccagcacgctctgcacagtgcccagctccgcacagctcctgtcctgcctcacggcccctgtcccatgtggtgctgtcaccctccctgcgcctgcacttcctgttggctcactccaggcggggcggaggcccatgggggctggatctgtttcccagtgtttcctagctcctagaacttgggttgccccatagtgggtctcagccaagtggagccactggggatagtgtctgggctccaacccctgttctccaggtgcatgtggcccctggtgggctcttggtagccagtgggtgcagttctcacttcctgctgccagagggcattgtgagctgcagcgcttatgaccaagcatgaagattcccgttttgaaaaatgccttaccagggcgcagtggctcacatctgtgatcccagcactttgggaggctgagacaggagaatcacttgaggccaggagtttgagaccagcctgtgcaacaaaatgagactccatctctagagaaaattaaaattttttaaaaaaattagctgggcatggtggtgcaagtctgtggtccccactactcgggaggctgaggtgggaggatcacgtgagtccaggagttggaggctgcagtgagctatgattgtgccactgcagtccagcctgagtgacagcaagaccctgtctcaacaacaacaacaacaaatgcctcaaaatacgagtctctgagcctcaagatgccagaacacacacacgcccagtgccacctatgtttgctgagtctaatcctgcacacacgtgtcagggttggccctggtgctgggggggtgctgtacccagcttcccaggcctggaggatggctctgccctagcaggtgaggcccttgttggctgcagagtcttctggggagtttgataaggcaaatgggggggttcctcgtgcccctggggggtgtcccgaggtgcagatcttggggggtgctggtctctggggagccggtggcacagtctgctctctggccctgccctgagggtctgagggtgccactgactcccatcttggtcttgcagatcatccccccgaaggagtggaagccgcggcagacgtatgatgacatcgacgacgtggtgatcccggcgcccatccagcaggtggtgacgggccagtcgggcctcttcacgcagtacaatatccagaagaaggccatgacagtgggcgagtaccgccgcctggccaacagcgagaagtacgcggggcgggcagggcggacctgacccccgcccccgggggcacacctgctcatgggggccctgggggcagagaaggtgcggtacacgcagcccccacagcatggccggcctgctctgtgtgccccgtgtgggctgtggcgacccctgctcccagggtggatctggaccctctcccggcctgggctgacccacaccgccctcatctcagtttcccagggcttcccagtgcatgtcgggcggtgtcctggtccccggcctgggagcacgtcctccacaccctcctgtgacacctgggcttgtggcccctcctcagagagggctccctggctccacacgggtacatgcacaggcacacaggagggcacagacacagaacacacgagggcacatgtaacacacatgggtacacagggcacacgcacgtccatacacaggcacacacgggtacacatggcacacgcacgtttctacacagggacacacaggctcatgcacaggtacacaggcacatccatgtgggcacacctatgggcgcctacccaggtacacatggcacctgcgtgtaccggcagtgttccgagtacagctccctggttcagcaggcacagccacgtagcctccgtgctgcgcaggcctgtcccgtcgccgtgccctcctctctgtctgtggcctccaccctgtctgtggcctccaccctgttgctctctgaggttcacgtgccttgtggctctggcaccagagcagagcctggtctgtcctgctcacccggccttcccagccccctagtctgtcgtctgagctcagtctttgccacacagggatgacaagagcctcccagggcctctgtcccctgcccactccccctggcgtgtgttctgatgtgggtgccccgggccaggataactgaggaggggtacgtgggtttgggccactgctcgcccgtggaagtgcgctgtcccacccggaagcaggttgcgtggtaccctaggcggggcagcgggcagtcggagcagagcccctcccgcctctttcatgggtgccctgggttccaggtggctgagggtgggctgcgtagcacccaggcctcaccctgagctggttttggggtgtttgttcaccaggtactgtaccccgcggcaccaggactttgatgaccttgaacgcaaatactggaagaacctcacctttgtctccccgatctacggggctgacatcagcggctctttgtatgatgacgtaagtatgaggctccggggaagaacagggaccagcttcctggtgggtggtggtgggagggccctgaacgggactctgccttggcagatgaagcttccaggcaggcaaggttaaccccctcgcccaggctctggatgcgggcctcgccctgtggtgacgaaagaggaagccaggctttctctgatttttgcagggcccctcctgcctcaccctgcagcccccaccctgagctcaccctggccccacctctggcctcagcagccggcccacagcgtgttacaaacacgtgtactttcccagtccctgccgctcgtcttcctggcactgtggagcctcgagtcctcagcccgccaggccacctgctggattcggctccaacccggtcctgacttgggctcagggcccggagacactggggtgaggggatctcccatcccgagcctggtctgctggagcgtcctcttgtccacacagcctgggctctccatgagggcagctggccggcatccccagagtcccagcctcaggcataaggtcccccaggccccgctggacgccagaagtgggcctgcgtggcgggtgtgtgtggaacagcagcaggaagctgtgactgccctgaggccacggccagccttggctctgccctgcttagtggaccttgtctgcgctgtggcccgcaggggactgggtttgctctctgagccgagggcgccggtttatgacacggaggattctgttcaggctggaagtgagcccgccctggagaacctgagggagacgcccccgacatggagccaggcataagccagccttgcttccggccccaccagaagcaaacatgagaccagagtatttcgaatttgagattttctttttttgaatatttgcatatacatcctgagatatcttggagatgggccctaagtctggattagtctgttcttgcactgctataaagaaataactgaggctgggcgtggtggctgacgcctgaatcccagcactttgggagactgaggtgggcagatcacttgaggtcaggagttcaagaccagcttggccaacatggcaaaacctgtctctactaaaaatacaaaacttagctgggcatggtggtgtgtgcctgtaatcccggctactcgggaggctgaggcaggagaatcgcttgaacccgggaggtggaggttgcagtgagccaagatcgcgccactgccccgcagcctgggcaaaaatgagactacgtcacaagaaaaaaaaaaaaaaagaaggaaacaaacacctgagactgggtagtgaataaagaaaaggtttaattggttcacgtttttgcaggctctgcaagaaacatggcttgggaggcctcaggaaacttagagtcgtggcaaaggtgaaggaggagctgatccatcttacacagcaggagagagtgagggggggggcgccgtaggcttttcaacagccaggtttcgcgagcactcactgccctgaggacagcaccgcggggatggcgctgaaccattcaggagacatgagcaatccacccacggtgcagccacctcccacccggccccaccgccgacaccgggacctgcagttccacagactcaagtctaaacacaaaattcatctgtatttcgcgtacactttacacacgtagcttgaagataactttacacaaagtttttaataattttgtgcacgaagcgaagttttgactgtgtcttaactgtgaccggtcacatgaggtcagctgtgaaagttttcacttgtggcgtcgttatcggtactcagaacatttgggaccttggagctttttgggttttggatttttggagcgggggtgtcccccttatcccgcacggcgtttatcggagtggggtgtccaccttgtcccgagtggtgtttatcggagtgggggtgtccaccttatcccgcgtggtgtttattggagtggggtgtccaccttatcccactctgtgtttatcggagtggggtgtccaccttatcccgtgctgtgtttatcggagtgggggtgtccaccttatcccgtgctgtgtttatcggagtggggtgtccaccttatcctgcgcagcatttatcggagtgggggtgtccaccttatcccgcgtggtgtttatcggagtgggggggtccaccgtatcctgcgtggtgtttatcggagtggggtgtcaaccttatcccgcgctgtgtttatcggagtgggggtgtccaccttatcccgtgctgtgtttatcggagtgggggtgtccaccatatcctacgtggtgtttatcggagtggggtgtccatcatatcctgtgtggtgtttatcagagtgggggtgtccaccatatcctgcgtggggtttatcagagtggggtgtccaccatatcctgcgtggtgtttatcggagtgggggtgtccaccgtatcctgcgtggtgtttatcggagtgcagtgtccgccatatcctgcgtggtgtttatcggagtgggggtgtccactgtatcccgcgtggtggttatcggagtggggtgtccaccttatcccgcgtggtgtttatcagagtggggtgtccaccttatcccactctgtgtttatcggagtggggtgtccaccttatcccgtgctgtgtttatcggagtgggggtgtccaccttatcccgcgtggtgtttatcggagtgggggtgtccactgtatcccgcgtggtggttatcggagtgggggtgtccaccttatcccgcgtggtgtttatcggagtggggtgtccaccttatcccacgcggtgtttatcggagtgggggtgtccaccttatcccgcgtggtgtttatcggagtgggggtgtccaccttatcccgcgtggtgtttatcggagtggggtgtccaccttatcccacgcggtgtttatcggagtggggtgtccaccttatcccacgcggtgtttatcggagtgggggtgtccaccttatcccgcgtggtgtttatcggagtggggtgtccaccttatcccgcgtggtgtttatcggagtggggtgtccaccttatcccacgcggtgtttatcggagtgggggtgtccaccttatcccgcgtggtgtttatcggagtggggtgtccaccttatcccgcgtggtgtttatcggagtggggtgtccaccttatcccacgcggtgtttatcggagtgggggtgtccaccttatcccgcgcagtgttgatcagttcatccgctgacggacatttgggctgtgttctctttttggctattttgaataatggtgctgtgaacgtttcttgtgtgtttgtttctttgtctttgagacagagtcttgctctgtcacctaggctgcagtgcagtggcgcaatctcagctctctgcaaccttgcctcctgggttcaagcgattctcctgcctcagcctcccgagtagctgggattacagtgtcacatggagtcatcccaccactctaatgatcccctgagctccccctcgtcattcctccctctcccccatccctctcctgcgccccaggcaaccactgatgtctcactgtctccatagctcagccttttccagaatgccgtgagctggaatcctacagtcggtagccttttcccattggcctctttgaccaagcaataggtgttcaagtttgctccatttttcatggcttgagagctcatttcttttcagcgctgaataatactccatggtccgggtgcaccacagtgtgcctgctcattcacctattaaaggacccttccaagtttggtcaatgtgggcagaagttttcatctcctttgggtaaataccaaggagtacagttgctggaccacgtggtgagaggacgtttagttttttaagacgccaccaaactgtcctcccgcccacctgtcccactgtgtgctcctagcagcagcgaatgaacgttcccagggccccgcttccccgcccccatctggagttgtcggtgttgtgcatcctggccaccctgggaggcgtgttgcgctgtctcattgccatttcaatctgcattcccccgatggctgccttcgcggcggggcccctttgcatgcctgtttgccatctgtgtgtttccttggtgagctctcttcatgtcttttgcccagtttgttgttgttgttgttgttgtttgagatggagtctcgctctgttgcccaggttggagtgcagtggcgtgatctaggctcactgcaacctccacttcctgggttcaatcatttctgtgcctcagcttcccaagtagctgggattacattacaggcgcccaccaccacacccagctaattttctttctttttttttttttgagatggagtcttgctctgtcaccaggctggaactacggtgcccaccaccacgcccagctaatttttgaatttttagtagcgatggggtttcaccatgttggccaggatggtctcaatctcttgacttcgtgatctgcccgccttggcctcccaaagtgccgggatttacaggcatgagccaccatgtccagcctaatttttgtatttttagtagagacgaggtgttgtcatgttggccaggctggtctcaagctcctgacctcaggtgatccacctgccttggcctcccaaagtgctgggattacaggcgtgagctaccgcgcctggccatctttttctgttttttaaccatgctgtttgttttcttctggttaaatttgagagtttgctgtgtattttggttatcagttgtgacttgcaagtattttctttctgactggggcttgtctttctcttacggatcctgcctgattgttttcaagtgaaagttcagcctcagactccagtgcatgagagcctctgggttggctggcctgcactgcctgcacttggcctgtagtgatgacccgggagggactctgcagccgcacgcaggctgtgccagcccaggccgacctgccacaggtgccaggggaagcttcagggcttccttgccatgtgtttgccatgcctagcctatgcactagcctacttttacagcgggggaaacagcccacagcagagaagcgacttgctgtggtcccaggatgaatttgcgcccagctcagcctgtgcctggggcctccctctgccccatctgggtctcatcactgcctccctcctcacctcttctgggctcctgccagggctcaccttgcaaaggaaccgctggtcttgccaagtctgagggccggtcgtgcaggtgcaggaacagctggtggggggtggattcaggctgtgagagcagctcacgttcatgtgtgtctgggctcctctcggcctctcagcaggccatgagcctctccggggactgcagtgactaatgtgtattttatgagctcttgggacaggacggggtttgtttgcttgtggcattaagaatagatgtgcctggtgggtggggattccgtccttgtttgcctagttctgaaaactgtcttcgtctcctcggtcagaagctgtggaagggctgtcactgggccttggctccggtaccatcgctgggttagccccaagtggtgactgtttttctccttccgtgtcattgacttagaggcgtgttaattatgcactcccaaactgcaggcttcacaacaaggcctccacccagcaggaagcacgcagctcagtggaatctgacaggccctgcctgcctggtgcacgctggcatgtgcgatggggcccttcctggaagggccaagctggcggtgagcccttcagaaaaggtgtctgggctgggtatggcggctcatgcctgcagccccagcgcttggaggggccaaagtgggagggaccattgagcccaggagttcgagaccagcctgggcaacagagtgagacttcatctctacacagaaaaaagtaaaaattagccaggtgtggtttctcacgcctatagcctatagtcccaggtactcaggagactgaggctggaggattacctgagcctgggaggttgaggctgcagtgagctatgattctgccactgcactccagcctgggcaagaatctcacacaggttaagaccagcccctggtctgcagggtatgaccggcccctgggggggccgcagatactggggtggaggaggatgggcagcgacccctgggactctggggagaattagcctgcaccccagggctcgcaggttctgggggtggccgggcggttgccgacgctgctctgccgccccacaggacgtggcccagtggaacatcgggagcctccggaccatcctggacatggtggagcgcgagtgcggcaccatcatcgagggcgtgaacacgccctacctgtacttcggcatgtggaagaccaccttcgcctggcacaccgaggacatggacctgtacagcatcaactacctgcactttggggagcctaagtcctggtgagtgtctgcactggccctgccgccggccggaccgagagcccctcgggagggagtcaatcccgggtacacggctgggcgccgtggcaggggccccaccaggtgaggccgcaaaggtcggcctatgacggctggagatcttccggaccgcctggggtcacccaccagctttggggtgggggatgtgcacccccagagccgaagctcccaggcccctagagcttgcgctttgtaccccggagtgccccccattgagctgtgagcggccccaggtgtccccatggccaggagcgtggtcttgagcctcctgagctgcccaggctgtgctgcctcacagccaagtggagacgttcctggtgaagggacactgtccatgctgcccagaggggcctggccaggatgaccctgcagccgctccctcgcagtctccgccctggcacgtctgggccaggccctacagttaggagggcagggcgtggcgctgcaggcctgtgtgcagtgtggtggacctgcccctgcccgggaggtgccgggtgcagcgtgggcgctgctgtggcgggctgagttccaggaccttctcctggctccctgtgcacgtcgcagcgaggccgtgtgggggtgtgtgtgaatgtgcacgtgtgcgcgcgcatgtgagtgcgcacgtgagtgagtgtgagtatgcatgcgtgtgtgtgcccctgtgtcaccgggctctgcttgtgactgcggaacctgctgggtgctccgcggggctgccctgcactgtcctccaagggccgctaggtggcgctcccgcccttcccggggccgcgctcatgcctggaatcttcccaggccgtcctcgcgctggaggaggacggagcctttgcctggagggcgtgggagctccgccttgcctggcccttccctgggttggagttgtaagcggggagaggggggggcgggggagaatgctgtacctcttcgttaaaaaaaagcacaatgagcaggaaggggcgagctgtgcgcatcctcacctgcgtccgaagcgcagatggagcccaagggaaaggccctgtagaggaccccgtgtgacttggggcaaagcgtggcctcccaggggtgcgtgggcagcgggacgcccatggtgtgaccgggtttgtgcctccatagggaccgtctgccctgtgcagagagcccctgtggggcgggaagtggcgagcagccggcaaggaggcccagccagacagaagcaggggggtcagggacatgggaggtgggggaccagccagtgagtcagacgtgaggacttcagtgccaaggactgcagtgccagcagctcggtctcctgtgaggggccccgggggttgctggctgtcgtgggagcctgggctgggggagaccctggggctggggctgctatgggtcagatgccagggccgggggtgcctgctgctaggtcagaggggcctctgcgggaggaggcgacagtggctccctggaggcggcagtggggcccggccacaggccgtcggagggactgacagggatgcgccaggagccgagggcctctcctgagctggttcatccaggacgcagcctctgagggcatcccgcacctctccccgaatgcccctcactgcacccctcctctgcttcgcctggtgccgcaggcgtccagctgccactcccatgtctacccttccccatgacccgtcgtgggagatggctcaggggagacagctggggcggggcagcgttgagtaggcaacagttctttcgggaagggaattccggaagcgccctgaccttggtcttggtttttgcccaggaaggggtggggatggcaggggtggggcctggcatgaggggcctgagaggagccacagtgtaggctctagctgcagggcatgccctcaaccccccagagctccccactcgcccccacagtcagctcagcctgcttagcacgcagggccccttccctgctctctcaccagggctgaggcggggccccagatgttcccacgacaccccatgcctgcgacaggcatagaccaggtgaccccagcattagccaacgtctactacgggctatcagtcctccccagcagatggtaggggccctggtcaccccgtgtcccagctcccagcaggggcctggcacagagaggcttggtgacttgccggagcctcttggatcctcactgtgtgctgtgggagctgactacccctccaggctgccctcccaacttgcaggggggtggggacaaggtaactggaaagagtgtctggcctctggtccctgggctggggttcaggaagctactcaggcccctgggagatgcttcccccctctcccttcctcgggcccttggggtaggtagggctcccagccaagagatcaccaaggctgcgccccgtctgtctccctcattacactgttccgcttgcatctgcagccgcttaattgcaaccatttcagagtattccagtgggattttaaagaaagtgtcaatgtactcaggtttacagcattttattaaagctttctgggtctgttgctactttggtagcttgatttgtgtgtcaaagtgacgtgaacagcctggtgtcaataacaggcagaaacatgcttcaaaaggctggcttctgtggtgctctcaggcagcggggctaagaatatctgaagagactgagcgcctcaaaatctctttggcaatgcggattgaaaccagagccagcacctgcaacttccccccgccaacttcccgcagccccttctgtcacccaggccgggggggccggagtgcaggtgggtgtggggagggtccgagctttccacttgaccctgtattccagggtcttcctgggtggggtggtggcctggggtcggtgtcctgaaggctgtgccccatagaagccactgtcccaggccacactccttgccatagatcaagactctcctggggccaggcgcggtggtttgcgcctgtaatcccagcactttgggaggctgaggcggttggatcatgaggtcaggaaatcgagaccatcttggctaacacggtgaaaccccgtctctactaaaaatacaaaaaatgagccgggtgtggtggcaggtgcctataatcccagctactcgggaggctgaggcaggagaatggtgtgaacccaggaggcggagcttgcagtgagcggagatcacacccctgcactccagcctgggcgacagagtgagactccgtctcaaaataaataaaaaataaataaataaaaagaccctcctggaacctggggtgggggtggtttagccgagctgaccctccaaggccggtcctgcggctgttcccctccaggcatcccctccccaacctgcacctgtggcagcccctgcagggcccaccctcctgagccgcccgggccaggcacgaaacacaggcgtcgccacgaggctgagcgcagtgtcgccagcagcatcacatgccacatgcccctagaagagagttccaggccggggtgggaggatgttgggtctcggccagccctgagagagttgctggtcccagggcacttctgggtcattcggattgtgctgtgcaccccaaagaagagagtggagtggccatcccccctcgagggccctggcccacgctgcctgggaaagtgcccactgttcagtcctgtgcacccatgtgccgggctgggacctggccgaggcttcgggtccccttttgcccccaacccatcagacaccctgcagggcagtgttggggtgtttaggggactgtgggccaccgccaagagcagaagctttggctctcactgcagcagggaagccagatgggggatcagcatgttcctggggctgcagggactcccgaggacgtcgtgagctgatgggacatggtcagctgcttgcactggctccaaggcggcgagaggaaggccctcctgaggagtgccgcggggccagcgcaggtgcgtggcagccacagaggcctctgctcaggcttagggaagggggtgtcccccagggtctctgcagctccgcttgtcagaaggggggtcatcctgcacccaggtgaagcccccaagagcagcggggcgaaggagcgcttgcccggactgcgaccttgacctgcccatgacccgcggcagtctggaaatcccccattgccccaggcaggatgggggtcccccatggtctcatctctggctgtttcctcaggggatcgctccgcccaccctctcctgcctctgtttaccttggacacactcagtctccggtgcaggtgtgggaggtgggggtctcggagcttgtgctcccgtgaagggcacggagcccccagttgctcttggccatcctgggctgctatgagccagaccctcctgagtgctgcggggagggctgctggggaggccaggggagaggggattatcagaagactccaccagcctcccttgacctttaaggagctgcaagccgagaattttcccttttgattcagctacaccttgagttttctctctggcgttttccctcatgggaatttcacagcatcttttcttcttgctgccagggaaacttgagtcctagcaggcatagccgtcttttgcttcatgggtgtccctggaggtgtgcgtgcatgtgtgtgtgtgcatgggcgcatgtgtgcaccgaggaaccgtgctccagacactgggggtgggggtggggagggtgggggtggggagggtgggttccagggctgcaggggaccagcccgggcttcctgccctgtggccgcaggtgggtggaaggcagagcctggggtggatgagtctgtcgcccacccaggccaagccaggctgttcttggggtggaggctgcgggcctgctcccttacccctctgctgcccgcctaactgcccctcaggacctccctggcccacccgcctcccagctccatctcctgctggcagctcctgcctgggggcagacacctccctccctcctgggctccctcagtctggctgcaggtggcactgtcgggccccacaatggcctctgccctgtcccttggagtgggacccaggagtctggtgggtgatggagctggcgagcccgtcccaggcagcagcctgaaggcccatggggtagcgcgctggcgcccggggaccctggtgtgggtttgtactgctgctgctggcgagccaaccactgggacttccagcttctgagcccgggacccggggggtcccaccagcagtggggacctagggtcccagtctactgaccgtaaggcatggcccccctcagtgacctggggcattcctcccagccgctttgctctggctgggccaccagaggttgggtggccgcagagacagctctggcggagattggtgtcccgacaggggtggcgtagcctgagctgagcactgggttgaaatggaaattgcctggagcctgacagcttcacagattggttttaataactcagcttccccacactgcactctgtcaccagaacaagatgcaggagcgagatagttgctccctcctctccttgccacccgaggcccaaccctggcgagggtgcctagggacagggctgcattggcagctcagagccgctgcggtgccctgggaggtcagactgagaagacccaccagactgatgggggcagcccgatgcgtgcctcgctcccaggcaggggaccgcagccaggtctcttcccagccacacacactgagccaggatgacagaaatagaaaaggaagaagcggtttagaacagagagctcccacggagagcagatcagaccagtagggaggcagagggaccctggtcattagaaaatgataaggtgtcaggagccaaggcagcttgctcagggcccaggttcctgcccgccaaggcctcagcacttcctccctggctcactgagacccgctgcagtggccccagcccatggtccctgggagccgtatccttgtagagacagctgtctagcctgcatgaggttatctggggaggctcttgatgaggggtgtcccctctctgcagaaggaacctctttttgagagaagacagttgttgtcacaagcaagtgaggcccccaggcccagtgcccaggccagctgctacgcctgagtagtagttgccaccagcccagaccagccactaccccccagcagcgctcagcaccagcccaggggcccagcgtcccggctgactggctctgggtccacatgggttgctgcgtggccaggcacacctggtgcccagcttccctgtttgaggagcgtggccgtgggcaggcaggaagctccttcgtggtcacctgtcccaatcctctgcttctgatggcgactgtggccacagcatcagtgcagcggttctttattcctgtgcgtgagtgggcctcagtgaccagctcagctctcctagctttatttattttattttagatgaagtcttgctctgtcatccaggctggagtgcagtcgtatgatcacacctcactgcaaccttaacctcctgggctcaggtgatcctcccccttcagcctcctaaatagctgggaccacaggcacgtgcacaactggcaaatttttaaattttttgtagagacggggtctccccgtgttgcctgggctggtctcgaactcctgggatcaaatgatgctcctgcctcagcctcccaaagtattgggattgcaggtgtgagcccaaccctttcccagttttaaaactggaagtcccatatcctggaacctgctcagatccagtgaactgtgatgctgagtcccctgagagagagagaatgtgtgtgtgtgtgtgtgtgtgtgtgtgcgcgcgcatgcacatgcgtacacatgtacatgtgtttgttagagaaacaagggtctccagtcacatagtctgtctgggagggagtctggccccctgggactctgcccagaagacgagacctgggagtctgctgggtaactgagaactggactttacccacttagctgcgagaactcgggccaggagctgagctgccagcagggcattgcagccgtgtggcctagagcgtggcgtgtggcgctggtgccgtgcttgggtaagtggtccaggctgcggccaggagggccggcacatgggagctatgaatggcagctgtgttttccctggcctggtcccctccccagccctcatcatcgagccctctgcctcgctcttgtcactaccactctgtcggcctgacgccatcagcccaggcctgcttatcaagactggggagtgaactgagcaccagaagctggctttggcgttcaaaaaattaactcgtgatgctgcaaagacctttgagcctcacactggggcgtccacagcgaggctgggattgcatctctgcgcctggcgtgtggggcacaggtgccagaatcacagcttctccggctggcctgatcagcctcctgccaacctcactcacgttaagcaattgcggcccgattgtgcccccaggacaggcagggctctcagctgtgtctcgtgatggtgtccccaaggactgggagaacacctctcggccagggtgaccgggaaacccggggcacatcggggcactcaccggggctcccaccgtacctgtcagtgggatctgtcccagcaggctggctcctggctcttgctgggagctggcagggacagacacagacacacttggtgtttgttcggggactgcagagcaattttcatatcgccttttgctgtgtgaaaatcgcactccaagctctcctccagagccgtgccactgagctggggacttccggtgtttggatggtcgattgccctgtgtgtgtctggacagcaggcaccgttgcccatggatttgggaaactggcttcttggtgagcagagatggtggccgtgatgggggccgggtgggcaccccgcagcaggcgagtgtcaggcggtgggcccgtgatgggggctgggagggcgccccgcagcaggcgagtgtcgggtggtggccgtgatggggactgggaggacaccccacagcaggtgagtgtcctgcaggtccctcttctcattcttgtcccaggcttgtgcttgtgtttttcatccactttttggtgaagtcttctccccctttctctctctttaaataggtctttattagacctgttttagattcactgaaaaagtgggaaggtagtaaccacagagagttccccaccgggttccctgttatgagcattctatatcaatgtggtacacttgtgatcattgatgggccaacactgatgcgttatgaactaagatccattctccagatttcctctgtcttcccccgttgtcttttctgtcccctgaacccatccgggtcccacgtgatgttgtcccgtctccgtagggccctgggctattacggtgtgtttgatgccctggacagtgttgaggagggctggccagggagtttatagaacgtcccctaatctgtatgtcccctaatcagcatgtctgatgtttttcttgtggttagattggggtgatgggttttagggaggaagaccacaggggcgaagggccctcccatcacatcctaccaagggtcaaaggcgcagccatcagcgtgatgtcactgctgatgttggccctggtcacccggcttgggtgtggatgtccagtgtctccactgcagagtggcactcccccgctttccatgctgtcatctgtgaatgtcaggcccaccaggatcatctccctttctttcttttttttttttttttttgagatggagtcttgctctgttgcctaggctggagtgctgtggtgtaatctcggctcactgcaacctccacctcccaggttcaagcgattctcctgcctcagcctcacgagtagctgagattacaggtgcgtgctgccacatttggctgatttttgtatttttaggagagatggggtttcaccatgttggctaggctggtctcgaattcctgacctcaggtgatctgcctgccttggcctcccaaagtgctggcgttacagacgtgtgtcactgtgcccagccacctccctttcttaaggttaactgatttgggacctttatcacatcttcgagaccctcacggcagcagcacggggcatgtgtcactcgaggagtgtgggagccctggggcggggagtcctggggtgtctagagccctggggtggggaccctggggcggggagtcctggggcggggacgctggggcggggagtcctggggcggggagtcctggggtgtctagagccctgcctgtcccggggcttcccttttgtaggcatttcttgctgtgaaacatgatttggtacagaaacggacataaagcatgtaagtaccagatatatatgcgtgtgtgtgtgtgtgtgtgtgtgtgtgtgtgtgtgtgcgcgcgcgcgcgtatgttagcaaatgactctccggctgtcccctgtgtacctcgatgtcaggacacggcccccacctgtgcctccttttcccagccccctctgcacactgtggtggtggcttcctcccggctctgctggcggcgcccttgcctctcccctttgccaggccgcgtgtgcctgtggcccgggcagtgaggctgtgtgttggctgcattggaaggtcttacaaatgggctgatttccttgcgtttctgctcaatggtgtgtgtgtaagattcatccggttgtgtgtggtggcagtgcactcattgtcatggctgtgaaattccccactgtatggctggactttagtcgactttttccattctgccgtggacggacatttgggctgtttccagcatgaggcttctgcgaaagacctatcatctcttcacctgctgctcatgtaagaaattcattttgatcgtaagccttgctatcagtaactgtgactggggctgcatttatgatgttccgttcctcatgcagcagctttgcctggagtaaccctttgacttgtgcccctggctccacgtccttgttcacggacgaggcacagattgaagagacgtccgatctgcccttgaagcgctgccctgtgggatcaggagggcagcgggtcctgggagcaggtgccaggacgatgtgcagccttgaggacagggtgtgtcccaattggcgagggtggcctgaacccgaaggtgtgggtgaggaaggagccatttctaatggagtcaccatattaagccctgcttagccaaacttgaaggtgacagtttgttgtgggacatggagatgatgcagggatgcggggaccgaggccagcatgtgtggtgtccaaggtcgccctgggtgctgctgtgtaggtgagggaagagggactgatgggctgcttagggggccatgtctgagggcagggcccaccacttctgcccacacctcattggccagcacccagtcacgtggccacaccttgcatcaagggaggctgggaaatgtagtctgaccacatgtccagctgggaaggggcaggtgagacttctctttcctgccatgtgggtgctgggtgccctgcaggggctcagccaacagggtcttgaggttgaagagatggatctgcccaagccctgacggagtgctcatgcctgctcagggcccagcatgagctgcgtcaggagcagaagccattgggaagggcttttggtgtggccgggcagccagacactccacgcgcaacccccagagcagtgccaggcccgggagcccttgggatggaggcagggagaatggggggctctgaggactgagggaggaggggagcccggtgaggggaggatgggtgaccagctcaggagcaggggcgggaagggggcatagaagcttcctaagcaggggagctactactcttggccatgttccaggaggatggagtggctgtaggagcaggctttcgggccagggcctgggtgtggtgggagccggggctggctctggaccctgcaggggctgccttagcctcacgctgtctgaccagcccctgcctcacgtcgtgtgctgagtcctgtctgcggcccctcgctcacccgctggcttggtctggcaggagcagatggccttcattttggagtcttttgttcaaagcgggcgcttcgggttggagtggcagtgcacacgctggctcgtgtcgcttgtgaggctgcaggatttttgttttagggaggtaggagccaaacaaacctggcgcccgcttccaggctgtggcatgccaggcgagtcaccggcatcctgtccctgcccaccgctttaagaaactgttagttctgtttgaaatgtcatcactgggcgtgaattcccatcttcagataatcccgccaggcggtgtttggatgaggagtttattcaggctgtgggggtctgtgcgtgcccgcgggtccctcccactgcagccggcgaggctggccctgacccagagtcgcccgcccacccagtctacgtaggcattagaggtttgggttctgagctcagggcctggtttccatggcaaatttctctcccttcggcgaggctgctgccggcggggttcagctccccagaagggagatggcagcaaatctgcgggaggagagtcttcgttatctttgcttaaaaattgggcagcgcatggcttcctcccctccacactcgccagcagcaggggacaggagcgctggctgccttctgatgaaacggggcgggcgcaggatggggccgatgacagcgatgctaatggccctcattcagcagcctcccgccgagggctcgggccgcttgttctccctgacctgattgcgagccaagcagacttaacccgtgtgtgagccaaaccctcccggagctccagagcccagcccgggtccccgaggcccagggagggacccagcatcctgcggcctctgcccgtggtgggcacaggctgagacttaggtcataggaacaggagcgcgtagcctcatggccatcggcctgtgtgtgagacagttcaactcccgtgctctccaaagctagtcccatcattacacgcgccatttaggacgctccaggccatctcggtcaccaggggcctggcggtcaccgtgtttcctcatgaggctcagtgggtgctgtgtgtctgtgggtgccggtgatgaaataaatgtaagcatagaggcatcagagcattttaatagatgggagcctccacagcctgcaggtatccagacgacgttctgcacacagagactcagactcccaccagggcctcacgccccactgcctctccgggatgcctgcgtgtggctcactcccaccacgggcacatcagccctggtgcccagctggccttctgcagagcctggtgctggagcagcttctcgaattctctgctgcctcctccccacagccttccagggcctcagagctgctgccaggccagcacctccttgggcccgtgttgaggccccacggggctgggctcatgtgggagctgatcttggccgggtgatccctcactgctctggacaaaagggagccatgggccgggcatggtggctcacgcctgtaatcccagcactttgggaggccaaggtgggcggatcacctgaggtcggagtttgagaccagcctggctaatgtggtgaaaccccgtctctattaaaaatacaaaaattagccgggtgttgtggtgggtgcctgtagtcccagctactcgggaggctgagacaggagaatggcgtgaacccgggaggtggaggttgcagtgagccaagattgtcccatccagcctgggtgacggaggaagactctgtctccaaaaaaaaaaaaaaaaaaaaaaaaaaaaaagggagccatgattgttctccagctgcagtccctgtctcttcagaccctctgtgctcttaggagactgtcgttgttctctcctttttaaaccatcctgtgccttttaacagaataaacggcaaggggtccccactgaggtcgaataatgctggaggagggccgtgggtccaggcatggtgggggctgcctcctggttgttgatgagcagaaattcaggccggtttgacggcaggcacgtgagggaggttgctgtgtgtcagtggccctgtgtccctggcactgtgtccgaacctgacagccgccgctgtgtcactgggcacctgccctgcgcaccctcccctgtgacgggcactctcacagctttcctggcgaggctgagggaaaaacatggcaaacaactcgcacatgactttgcgtttttggccttgtcatataataaaagtaatttgtgggcctaaaataaatcagggctggggatcagatgcctccaatctggcctttaattgcaggcgtgacatggcttgcctcggcgagtctgctcctaattaaagtgggctggcggtgtatgaagttcgcacggatcctcagggtgctgacccagccccggttccggagggccagtgtgacgacacctcgtggcccaggagagcagggcgggccacccatggccaccgtgccaggaatggggtcttctggctggccctgcgagagccgagagctctgtctcctccgcctgctgctccgctttgtcgggcattcctgtgggcggctctccccatcccaggctccccatcttccctgagccgaggctcccaggactctgctggtctcctgtgtgtctcaataaaaggtcattatttgaaatcattgtcaccactggtttaagataccaaattccatcatctcttgtcccgtaaaacgatccattaaagataaagccactgcagctcaataaggctgtttcctgggaacaagccaccctgctccctggcagatcctatctcccaagcaagtattagtatctgccacataaaggagcccctgtgctggggacaaatgagggaggtggcctttccccaggatgaggctccatgaaagaagatttttccagtagaaacaggcaggttggctcatgcctgtaattccagagctttgggcagctgaggccagaggattgcttgagccagccactggagctcgagaacagcctgggcaacattgcaagactccatctctacaaaaaaagaagaaaaaatcagctgggtgtagggcgcacacctgtcatcttttagctacatgggaggctgaggagggagtattgcttgagcctgggaatttgaggctgcagcaaagaccctgtctcttaaaaaaaaaaaacaaaaaacaacaacaaaaaacaacaacaaaaaaaaacagaagaaagaaatagggtagctttccatcagatattggaggagttctgtcattgccttgggaggagccgtgcagcccaggctgggctccatttctgcagcggtggcatctgggggagcagggctggccccgcagaatgccagggctggagccttccccatggggcctgcacctgctctgggactcccgtttctcctgtgagtctttgcgaaagggtctcactcctcctcttcctgccctctgtccggtcccctgtaatctctccctcccagcaggctgcggttggtgacatctcctctccctctctctcagccaggatatgggacctcagtgctcttggcagttcccgggctgtctgtgtgtcctggcctgtggatccactcccttgcctgtgcaggcactttttctaacatctttatctctccagactgacctgtggggcagctgcctgtcctgggcgacccatcctcctggggtggccatcggtagcatgcctttcctgctgctggcgactacgtgatgagctctggcacctgcccttcctcccgtccgtccccatgcgctgttgcaggggtgtggaggggttttacccagggaggcactggcttcccaggtcagagcctgtgagtacagcaggcaagtgcactaccaggtctgtgtgtggccttgtttgtggagagaattcctgctccaccctagacgagggacaggtttaccctagtgggtttagagtgttctgttaatgttctttctgctgtagaggaaaccctctttttgttgacttttttttttaattaaaaattctgccaccttgctgggctgtgtttaattctatagttttaccagtttctttgtttgcttagatttcctaagtagaaacttatgttataattaaactgttttttttttttttttttttttagagatagagtttccctctgttgcctaggttggagtgcagtggtgcagtcatggctcactgcagcctcaacctcttggactccagtgatcctcctgcctcagcattctgaggagctgggaacacaggcatgcaccatcacgccttacttagacgtttatattatgattttaagaagtttgtcttatcccttctgcttggtaaaccctttgtctttttcttgatatatcacattggctagtgtctctagtgcagtgtgacgtgtgctgtgatgatgggcaggttgtgtcctctcctgcctcgccatgaaggtggtagtgggagagtccctgctagtcctggttgcctgagaatttttgtaccaaatgctttggaatttttgatagatattaatttttggaatgtctttgcaaccttggagataaactcttcttggtcttgcaatagcctactgtgcttgactcactaatgctgtatttaggatttttacatccacgtgggactggctgatcattttcttgcgtgttctttgttggtgctggggtttcccatttgttcatttattcatccatttggaaaatatgccggattcagaaaacgagctcagtaacgtcagatattccctactgcttgccaaccatgtgtgtacatgggcactgtccctttagatgaaggtcatcgggcaggattcattaaaaccacctgggctggtgccttttccagagaggacatctgtgacctggtctcttcagggtttctggtggggcctgtgttgacttggtggacaccctgggctccacagtgctgaagatactctgaagagccaagtgcatctgtggcactgagcccagcaacgcaggcagggaccgtggctctctggtccttgtgtccccagtgcggtgaataggtcctcaggttcctgtgaacagctttgtttgtggtgcagtttccatagcatacatagaaggcgctcagagaacttggccatttccgtggacggagttaacacggcgcagcacggtggccaccacacagacctgtgtgtccctggcccggtcaccatgcggctctgaggagcagagcagaggagccaccctggcccggctcgtctttagctggctccgggactgcatgtcggctgaggggctcgtgtggatgtggggctgagacagcagctctctgttgggtctcgcaggaagcccaccctgtagccggcttgctctccttcccggcctgtgccagccacagggcagtgcgccagagccatcttgctgggtcacaggccggggccaccatagggctttgttgcgagggtggcggtcaccatggcttttccgttctgtttgcaacttggggtcccgggggcgccactggcgtttggatctgccgtggccctcctgggcttgcgtgggtggctcactctgccaggtggcctctgtccaacctgacacctggtctcgggtacttccagcgtgacgtgcacgggctctgcctccctcattctgtgtctgcgatgatagcgcattaaatggcgaaggcccgtctgcccaggcctgtgcagacactgtgaaattaactttctcaccctccagcacgcattgggctgtgccgacatctctgaagggctcttggtcggacctctgctcttggcacacattcctcggcggcgggggtggggggtagggaggagagcgttttcatccctggcacctaattgccgagagcttccgctggcaggagctgtcaggctgggccgtgggttggattccaagtgccactgtcacctgggagaaagctacacgaatcttaaaaaaaccttacactatgatgtcccgttgcctggttcagagccatccacagggaccaagcaagatggtgccaggcaggggccactgccagaggtgagggccacagagtcctggcttgagagcctccaaggagcccattccgcttgcagtaggagggagagggcgctgggagtcacctggtcgctctggaagtgccgcccaggtagggagcctggggcagccggcaggtgtggtggggacatgtgtggccggcaccagcatcacacccctcatccagagactttgccccgatctcgggttttctgcctggtctgagaggcagcggccctgctgtcattgcctgcccatggctggcaaaggcagaggctgtgaggggacaggatattggacccccacctcctccgcctcgggttccgaggtcaggtgcggtgtgctttggccgtggcaggcggggtccctgggggtgctggggcgtcagccaggcaggcagtgcccacaggcgaagcaggcagccccactgcgcagcgtcacctagcacaggaggggccacagcgcctgctttgcagagaccagtgggggccacgctttcatggagccacatgtgggcccgcctcaggctggggccctgtgggatggtgcccaggggtggcctgggccgtgtgaccccaagcccgtctgctcaccgtcatcgtagctaagggctccctggcaggtcccagctgcccaggacggcctgtgttccctttcctgacacactcatttaatttttaactcaaaggcatttgcttatttattttcattgttcttgataataattctaagccattagaggggaaaattatattcaaaaatgctgtttcacactttatttgtttgatgatttagagcgatagaaaatagcacatttgctggcttttatagtctgataattattcacatccatcaagccattccgggggaataaacaaaacaccaagaaattacactattaatagcatcctctgcggtggacagaaaactctttccggggccagcgtggcggcgagatgacagtggcctgtccgctggctggaggggagcgcctgcctgcagagaacgcctttgctttcattccctggttccggctccagctccggctccggctcatgagctgcccgccatccatcccctcctctgcacggccgggggcttctggggcccatggcaaaggttcgcccacccgtcgccaggagcccctggggaatggcgcgagcagaagaagcaaggctgtcggggcctcgcagcatcccccgggcagctctgccgccagcccagactcaggcctggtctcagctcgctggctgagcctggtggggcatccccaccctctggtctcggtgctgaaacagggacatgcggctcgttgctgcctacgttgggcccagtccttggctgcagtcctgacctcccgtgtgaccagtgtctctggacaccagtcagactcatgtgtgtcaggccgcggggctcagcctcagttgctctctgcttctgggtcccagcccctcgagaggtggcccggcccccactcttgcccagtgggtggctttgaggcttttagctttgcctttcttgggtggcagtaaagtgtaacgttggtgacattcactactcaaaacacctcaaagtgtaaaagagaagctgggaaggtagagggtccgggggctgcccacctgcccgtgcccacccacccactgcccctgtgccggggtgtccttccttctggatctcatgtccttgttggcgcctcacatgtgtctccccatgggcctaggaggtcactgtgctgcctcacatgtgtctccccatgggcctaggagctagtacactgctggaccatcattttgtttgttaaccatcatgtgacctcacgtgtcttgtgtccccaactccagaggggccacgtcctagcatttgtctctcccattgttttattttctcacccacgctgctttggcttgcacatgactgactttccgaaagggtgtccgatgcctgggtttgtttcttgacctcctggtcaccaccacgtatggctctcacggagcttgtggagccttctgcggccagcaccagacaccaagggtggctaccaggtatatggctccagatcccgggctggagatgcggagccgagtttctatgactttgtggtttactgtcttccagaaggacttgtgtacagcattccagaacagagggagtgggtacggggggcagacagccagggctttgagaacacggagatggagaccccgctgggggtgctgtggacagtggtgcagaggagtggcgatgcccgggtcctgggtcctgggtcccgcgtcctgcgtcccggccgatgtgagtcctcagacctcctaatagcattcgccctgatttagaaccagattcctccaggcaaggccaggggcctgcagtgggtgcacctgagggacctgtgcaggccacccctccctcccgaaggctcccctggcagcctcctcaacagtgctgtcttcagcccccgcccagacataccccagggcacctgctccgtgctcggagagcttagcttgctgcaagagtccttgttgcactgagctaagtctccccacccccttaacatttctgactctgccctctgaagccccgtggctgttctgccttgcacagacccacgagattccaggagtcgctcttcctgcttgctttgtcttgacctcttcagcttcttccagcaatccctgtgcgctgggccgcagaccctccgcaccctgcccctggcttagggagagctgatggctgcagagggctggccacacacagccccagtcctggggacgtgctctgaagatggtagaagggagggacacgtacaatgacctggcctccagggctctagagggtgagaggtggtcagcccttgcggggtcccggggaggttgacagagtcagaggacagagagctggtgtgggggcctttgtgtcagcaggaggtggtgctggcatgggggagggaggggagggagggaatgccaggggcttgtgggcagggcccgtgcaggtcatggagccggtagcatctcagagctggacagaggaggtaggctgggagcaggcccggttggggaccagtggcccctgcacaggagccagagggcctgggcagctgtctgtccagaaagcatgcaagaccccgtgccacccgggcacacagggctgtcgtgtctagaaagagatctcctggggtcacgggcaggcaaagctgattgattttggccgtgaagtttgaccttgtgatggaaaccgagctcccagggagtgagacaaactgcctccccgtgtcagtggccaataaacctgacttggttttacagccccgagaaattgctcactaatagccagacagatgctccccctgcctcgagctttagtgaacaaacatttccaaaccaaatagctgcttttgcctttttttttttttttccctccagagccaaggccaaatgtcagggatgccccagcatggccccgagcagggactatgaggagggggccgtgcattcttcgctctttgggggcctgggcggaggaccctgctgagacgcccctctgggaggcccgaaggctccctgagtctcttgtcctgtggtgactgtgggtctctgccgtgcatctgcttcagtccgccagttccatggcccgcccaccagtgccgtcgcaaccccgtcctttggactgggcttttcaggacatccggagagccttggtgtgagaagcaggccccgaggctaccttctggtcccccgtcctggggttggtcccctaagcgaacgcaagcgtgctttcagccctgtgtggacggagcgtggcgcctccagcctcactcagttctgtgtgtcctaagccgtgtcctggcactttctcttggaaactgaggtttttcttccgcctgtgtccttgggggtggccgggaggcaggtctgccagcatcaggtcttctggtccccgaggccgtcgctgggttgttccgagtggcgggaggtgcagctcgctgttgggcactggcggtggcggagcccagaagtctccgtggctgcccggcctcttgtccaagagtcctttgtgatttctgtgggggctgctcctctgaacgctgggcctgcgtcccgcagtctgtgctttctgataacgccagagccacgttccagtgtattaaacttttaacattcgccagattcaattaatcttatctttacaactcccaattacaggcagtaattaagtggagcagcattgtaggctggggatacggcattaatcatcgcagccttggagccataaattagttccttcccgtccccagcatcttcccagaaggagcagagtgtttcattccctgtgcggaggggtctttaatcccacaaaggtgctttggattgggattaaaatttctcatctttatgtaaatcataaaagcccatttaaaaaagaggaatgcacccctgtctagacagtggaagactctctgaggacgacagagttgaaggtgctggggtcgccttggctggggaccctgggagcatgcccagaaattaattatttgtgtcctgttagattagaggctccgtgatgttcgcctcttctctggctcctgccccctccttatttatttttatttttatttttattttttttaattttttgagacagagtcttgctctgttgcccaggctggagtgccgtggcgcaatcttggttcattgcaacctccacttcctggattcaagcaattctcctgcctcagccacctgagtagctgggattacaggcgcctgccaccacgcctggctaatttttgtatttttcgtagaggcggggtttcaccatgttggtcaggctggtctcaaacttctgacctcgtgatccacccgcctcggcctcccaaagtgctgggattagacgtgagccactgcacccggcctgtttgtttgtttgtttgtttgttttgagacagagtctcactctctcgcccaggctggagtgcagtggcaccatcttggctcactgcagcctttgcctcccaggttcaaatgattcttttgcgtcagcctcccgagtagctgggattacagcctcctgagtagctggtattttgtatttttggtagaggaggggtttcaccatgttggctaggctggtcttgaactcctgacctcaggtgatctgcccgcctcagcctcccaaagtgctgggatgacaggcatgagccaccgcgcctggcttctttatttcattaaaaaacaaagtggcctttcagctggaaggggctgtagtggagcaggggccgtctcccaccctctgagcttttccttgtcttgcttctgccctgggagggtctcggggagagaccatatcatgtgtcctctcatctgtgtgactgttctagaacgggagctgttggccttgttactctagagttggggtcgaggatgggacttgaccatcctcagctggcactcagctgtgtgccctcaagtccctgaggccctgtcctcgtccccttcgcttggaaattgaggtttttgttttgccggaggccttgggagtgggctgggtggtgtccccgttggcactggggcttctcgctccccctcaaggctgcggctcctggtgcccaccctccctgatgggaagagagtcccaacatcgcaggtctccagcttctggtacggcatgagcgggatgccacccccacttcgcttcgtgtgtttgcacactttcatcttatgtctttcttattcatgatggagccttggtgatctttcaaatgtaaaatgtgtaaaaataaaacttacaaagtcggtgacaaatgcagcttttctcatttccaaagctgctttttccctgttggctcccagtgccgggaaagggtgacgtgggcctggagaccgtgacgtgggcctggagagcgggctggcagctccgggggccccagatgcttgctgttccagactcggccctcccagggtcccctcgccacccgcagttccaatccaatacttttgttttttgccttttcagcctcctcgaggtggagtgccgcttaaccgggagcatccccactcctggctttctgagtgtgtcacaagccaccgagccatggtcctcactccccgctcctccacctgccccacctcgcttccttacggattccgtcctgaaagcccccacccccggccatcccctccacacagtcctgaccatgactccactttgcttctgccctgggcactgtctgcgtctccccaaggctggtcccaccagggacacccccttgcgtggctgccaccgatcttgcctctgacgtgcctcccttctctcgcaggtacgccatcccaccagagcacggcaagcgcctggagcggctggccatcggtaggtgcctgccctgagggccccagggacctgggaccaggtgggaggggcctgtgggtggggaagggcagctggcgtcccccgggctctgctgcggtctgggtttgggttttggggagtggtgacattctttgagccattactgtgtgattttttccatttcctcccaccctcgtggtcagattcacgcccttctgccgcgcagtttgtctcttgtgaaattcgcacagaatgcccagacgctcctgttttccagttttcttagcgcaaacttcttgggcctggtcaaaggctgccagggcccagggagggcagcctgtgttcattttcctcccatcacctgaccccacactgtgcccttgctaattctgagaaagcctaggaaaggagacaattcagccagcagtccgcttacctgcgggggagcagacatggtggccgcacggcgtttgcccttgttctgctgggacccaacctggacacctttggcaaatgtcctcactggtgatgccaccagctcgcgttcatgtgctccctggggactcttgggaaagaaggggtttgtcatagagggtcccagcatgtgcctgagggagtgccagatcctcaggttgtgggatacttggaaacaagtcagacagctggagacacccgggatggggccaccctgagctcccctgaccacccagccctgaggcacttgggcagggtccccatgtcagcgccggcatcacagcacaacaggggtgcaagtttcatgacacctcactgctcctaagtgcctggagagtcatgaaaagacacagctggctaaagcagttcctccctcccgctggtccattcccagctgctcaagagctggctcctccgcattggcaggtggacagcttggggtgcgtgaggggtgagggtcagtgagggcccgttgttcctctgacagcattgagagggccctgtccgagcaccccgcccttcaaggacggcgtcaggcagctcagcaagcgacagccacagcttttccaggagctctcacccagcctcagtacaggctcccgggactgcctggttgctgtcctctgtcccttccaaaccttcgagccaaaggacgcccgccacatgctctcttcccccttcccatgggcttttggctttggagatgggaactgtcagtctttctagggaaataagggtctcctgtcccagagactgcgccaggagtcacgtggctgtgcaggaaatgttgcccaagcgcggcagattcggtggtggggacggaggggaagggagtccttggggagtgggctgggccctctcctggcatgtgctctcctggcttctggactgagggctttgctcttggtatttttgagcgtttctattggaaacctggacccctttcttaggcacaggtgaatcctggtcttaggagcacgcttctggtagtagaaattctgcagtcacagacaggccgtagcaaaggtccagctcacttacatactaaagctgtgaaagaaaagctagattaaagcatttctcccattgtatgtttttaataccaatttccaaaacaaatttgaagacataagctaaagaaacattccccatgttgtattagcatcctgaggctcctgtaacaaatgaccacagaattaatggctgaaaacaacacacgtttattctctcaccgttctggaggtcaggagtctaaaatgcatgttaaggggctaaaacccaggtgcaggcagggccagttccatctggaggcaccaggggagaacccacttcccgccttttccagtgtctagaggccgcccgcattccttggctcggtcccaggggagaacccgtttctgccttcccttctccagcatctagaggccacctgcatcccttgacttgggccgcatcactccagcctctgtctctggtctcctcactttcctctgctgtaaccaacagtccctctgcctcgctgttctgaggacccatggaatgacatcggatcacccggatagccagggtgctcccccacctcaagatccttaactcgatcccatctgcaaagtccctttcagcatggaaggtaccacactcacaggtcccaggggttagcatgtgggtgccttggagttccatttttcagccagccacacttagaaagccactgaagaaaacctcactgagcggtcagggagcacctgtgggctccttgtctgctgcaggcatgacaccccacacctctgtcgtccacacggcagtacctctctactgccacagggcaggggatgcaggcgcagcctggggagagccagcagccccggtggggagcaggctctaggctccgcagtctgtactggagctgggcttcacccaggcgggcccctcctggtgctctctggtgcccagatcgagagggccaccccatccttgccagccacttctccccctccatatttaactgagactacagttagccactgtcccctcccttctcacccagtgtgacttttgcattagaaaagcagaggttgacaggagcctgctggagaggccacaggcaggatctggtgaggccacccctgtccccaagcactgccacatcccctctccctggaatgtgaccagttctaccctgaggccaggccaggcacctggagggctggtttggtttctaagtgtgcagagggctcagtgcctgggctgggtgagggggagccagggaagaattagttcttggtggtgctttcacaggggttcttagaaagtatggactctggccaggtgcagtagctcacacctggaatcccagtgctttgagaggctgacgtcagaggattgcttgagcccaggagttcaagaccagcctcaggaacatagtgagactctgtctctgtaaaaattagctgggcgtggtgttgtacatctgtagtctcagctactcaggaggctgaggcgggaggatagcgtgagcctgggaagtcaaggctgcagtgagctgtgatggagccactgcacttcagcctgggtgacagagtgagaccctagtcacccttcagcagggcagagcagcttctaaaattctgggagccagcctggctgtgaaccccgaggagggtcaggaaggttgtgggatgtgtcagatgcctgcagctgcgtggaaacaccttgagtcccctgtggcctctggctcagggccctgccctcccctctggaaggcagctgggggcaggatggggcactaatggggaaagcctacccgaccccccttgtgttcctaggtgcccctcccagactctttttggggcaggcgatgtgttccatcgttgggacggtggaaggggtgtgcgagtaatatggaaaatgaatagctgtgctccaaatgggctcaccgggagagttgtggagcctatggagagagcattaatgtgctggcgccttattggtgctaatcacttaaaatgtgcgcctttgttagagctttaatgagagccacttaaactgtgcattaaaaagaggaactgcggagaggccgccggcaggccgggcggcaggcagtcatcattctcgttgaaatgcttttagtgtggagaaaagttgctggattcggcaaacccctgtactttgcaaaacctcaccgtggtgtctgcgtggctgggtgtcagcagaagcaccgtggccccgctctcccgcctccccgtgcgcctgggcctccgtgtgctggtgctctcgcacacagctgtgccgccttccaccaatgacccaatgggtgtgtgtcccgtcctggaggcgcttgaggtctgtgcaggcttctagaagggccctcgggctggccgaggctgttggtcagtcctggcaggaggtggacgcctgtgggcttcctgtctgctgcaggcgtgacaccccacacctctgtcgtccacatggcagtacctctctaccgtcacagggcaggggacgcaggcgcagccgggagagagccggcagccctgttggggagcaggtcctagtctccgcagtctgtgctggagccgggcttcacccgggagtgcccctcctggtccacatctgacccccgtcctcctgcctcctgggccggcctcctgcccgttgccacttgcagagtgggtggtggagcaggaagtgcccgagatgaggcggtaagtcccctccctgaactgctcttcctggcttgggcccgtctggctcccctggtgttggttccgggggcccggctgcttcagggaagtccctttggcacagggattgtgttgcacactgaggggcgtgggcctcagcagctgctgccgggaagccggggcatccttaccttacccgccaaatgcacgggtcttcaccttgtgatttggaaacattcctgaactgtgctaattaggaagcttggtttattttttatttttatttttatttttgtagagatggggtcttgtgatgttggccaggctggtctccaactcttggcctcaagagatccatctacctgcctcggcctcccaaagtgctgagattccctgtgtgagccaccgcgcccagcctggctgtgaggtttgtgaaggcgccaagctgctggtgtgagtgcctgtttcccaggcgctgctttaagtcagctgcagagcgcactcctagacagacagccccacacacatgtacgcagcccaccatgctgagcacggcccaacaggaagaggttgtgagctctgaccacagctcggggtcaggcccactctgccacttcctggtggtgctggggccgagggtgagtcagttggtggcccgggcctcgatttcctcacctgtgcagtgacagtgaggacacccgctgtgctgtgtgggggggcaggtgcacagtctcattcatggccttgaaagcaggtgcccaagggggaggcagcactgctaactcctcaccgtccctggctggtctggttctagaacatcagctccgagaggagagcggccacactgcgtcctttccccagggtcgtgctctctcgttgactgagtgacgagagcggccacactgcgtcctttccccagggtcgtgctctctcgttgaccgagtgacgagagcggccacactgcatcctttccccagggtcgtgctctctcgttgaccgagtgacgagagcggccacactgcgtcctttccccagggtcgtgctctctcgttgaccgagtgacgagagcggccacactgcatcctttccccagggtcgtgctctctcgttgactgagtgacgagagcggccacactgcatcctttccccagggtcgtgctctctcgttgactgagtgacgagagcggccacactgcatcctttccccagggtcgtgctctctcgttgactgagtgacgagagcggccacactgcgtcctttccccagggtcgtgctctctcgttgactgagtgacgagagcggccacactgcatcctttccccagggtcgtgctctctcgttgaccgagtgatgagagcggccacactgcgtcctttccccagggttgtgctctctcgttgaccgagtgacgagagcggccacactgcatcctttccccagggtcgtgctctctcgttgaatgagtgatgagagcggccacactgcgtcctttccccagggttgtgctctctcgttgaccgagtgacgagggcggccaccctgtgtcctttccccagggtcgtgttgtctcgttgaccgagtgacgagagcggccacgctgcgtcctttccccagggtcatgttgtctcgttgaccgagtgacgagagcggccacaccgtgtcctctccccaggatcgtgctctctcattgaccgagcgactgtgtgggctgtggtctggtggattttgtctggggaggtcggaggagaagtctctgcatagccgtgccctgtgagggacccaagtgtatgccatgggtgggcaccttgtcacacaagtaaccctggtccttcccctggtgaggaggcccttggctgcccctgctgctgggcagagacgagaccaggcatctgctcacatggtcactgcgcagaggccagagggtgtcaccactgtctgccacctgcagagctcacagcagggcactatggggcggctcctgcgcatctccttccccccgacctgcaggcactggggccctgagaaccaagggcagatctgggccgtgctctgtgctcccacacgcccgctctccatgggaggaaagagccagcctgcccagagggcagcatcctcgctgaccccggccggctgtggcccaggagactgacgtctgtcttttcggccctaggcttcttccccgggagctcgcagggctgcgacgccttcctgcggcataagatgaccctcatctcgcccatcatcctgaagaagtacgggatccccttcagccgggtgcgtacgggtggggcctgcacgcctgtgggtgaagtgggtaccgggtccaagcccaggtggccgcacataccccaggagataagctgtttaaccctggagaagtttctagaacagtgattagcatgccagaggagggccgcatggctcagcagttagcctccagctcttccacggggaagcgaagatggcagagcttgaatctggcggggtgttaacctcccctcccaaaccaaaccaaaacttcctcctgggtgtggccatcagaggcccctccgcaggggctgcaggggtggaagggcaggggcaggccctgctgacctggcaggaagctgccaaagaaacagagggcagggcccctcgtcccgtgcaaggtgggaacctggttcctaccgccccaggccacaccctaagtctcaggcacccccacggcccatgtcacccggccgtggagagaactgcctgtttagaagtgacatttcgggctctcctgcaccgtgaagactgtgaactcattcagttcactgcttcaggggctgctggtggaggctgtgatggaggagacctgaggccggggggtggggcctccctacacctgatttgatggacagctggggtttggtgtcccaggagcagagcaggctgtgctcagggtccagctcagcaactgcacccactcgaggcagttccttccccatggagaagcctttgtccatgggagagtctaggcctgtgtccccagctctgtccaggtgagaggcacgtgccaagaacctgcaaggcaggtctgggccgcagcccagctcatgaggttccacgggaagagtgatgtgcaggctcgggagcgtgctctgtggtgaggccctgagtgtcagccagccggaaattgcttgtgacatttcaatcaaaccgccaaagcatcagctcacacatcggggatccgctcttcctggcggggctgcaacccagaggccgcctcccagccgctgcaggcattcatcagacagcacagatctcgctcggagaagtgcgcatttccggcctttcctcttctcccccgtcttctggttggaacatcattcagtaccagcaaaaccagacagatcacggcattgctcagggaagtgagaagtactgattttctggctggtttgtctaaaaccttctccaaagtggtgcttcctggaggggggtgcccatcgaaggggtgggcaggcagtgagtggcctggactcccaggtcagcatctgtatcgcactgcagtttatctgtaaagttcctgaacctgagccaaaggtggctcaccaccagcctcagagcggctgctggcaccatgcatggtagcaggcggggtccaggcagtacggctgcgctccccaacaccgccagctggttgctggggccgggcgccagtttctccagaggctgccacagtgaaggcccctgtcccactgcagcgaacagcaccctgtgccgcccggcctggggaccgtccttcagcctctcagacgccatgggcttgagatgaacgtcccttccagacagcagcgtgggtcccctcatctgaattcctggcagccttcaaacaagtgactccccacactccccttataaatctttgtaatggtatttacttctaggagaaaaagccgatcaatagcagagctttttaataattaaaagtgtgtacttctgtaatctgccattgactccctcatttattctgcaagagctcgcagaggaaaccgagttccgggctttctccgtgcctggtgtctggggccgcgtcctgtcaccactgatgactttgccgcaaagcctattcatcatcccaacgccttctaattgattgttggataatgttgacagcagtgacacaggggacagacaccgtgagtgtggaacgaagccaccaggatgcaggttttctcgcaggaacataatcttcttgtcctaaccgagcacattttctcttctaggccttggttcataggagggctgggggagtgaggtccttacactgtgagagcttggctctctgctgccatcacccccattcaatcttggcattccgggggcccagctggatccctgaaggctctgagtctgatgtctgcctgacgcatgcctgcaggcctggttctccaggggagagacagggagccgtcacttggccttagagcaggtggtcagggaaaagcctttccgaagccggctcaaataggataaaggaatcagtaatggcatttactttactttcttaacttttctttttttctagagatggggtctcactctgttgtccaggctggtctcaagctcctgggcataagtgtttctcttgtcttggcctcccaaaatgctgggattacaggtgtgagcaccatgcccggcccagtaattaggtttttttttaaaaagccccaaaccttaattttatttgcccctcatttcacggagctcccagcgtagtggggagaagctggcccagagaaccccacgtcctgcacagtgagggccagcccttggggaccccatgtcctgcacggcgggggccaggccctggggccacgtgtgttccccccccacccctattttctgccgcgtgctcgttctgctgcacgtggctgtcacttgaatgggaatttaaaaatataacttaatgcacactgacttcccttgattggtgcaattaattatttgaaaagaaaaatatcacagtgttcttaaggactggcatttttccaagctgtgtcagttttgattgatgtctgacgccgtggctggcttctgaaagcctcaccagttctgatggcttattggcgacttcagtgtatccagcaatctctgctcatctttctgggggaatatataatgatcagcaggcctgagaactcctacaaatcagagataagaaaacaaatggcccgatgaattcggcgtgaggggcttgagcagacgcgttacgaaggagctgcaggaacgaaagccatggttcagtgcccagcatcggtagaagtcagaggcagccagctgggagacaccgccagccccaggacggccacgtcagaacaccgccaccagatgccagtgaggagggcgcagctgcacgctgctcccagccggggtggatgcagggcggtgccatggccatggaaaaccgttcggcattttcttggaaacggaagcatgtaccctgtgccccagcgatgccactctgtgcatatttactcaggagaaatgaaaacatatgtctccagaaagattggtacataagtgttcttagcagttttcttcacgagagccccaaactggaaacagcccgcacgtccatcaacaggaggatagataaataaataaccatagatccacgcgcaaccgagtactgtttagaaatgaaaaggagcggtcgcctggtgcacaggacagtgggaacaaatctcagaaacgcacgccaggtggaagacaacaggcacgtgtccctgccgtacaacgccattcatgtgaaccactaggagggaacgaggtctgtggtgactgagagcgcgtgcgtggttcggtggggatggcctggtagagggctggtaggaggggtgcctgggggcccggcatgttttgttcctgtctggatcagtggttacgcccagaactccgagcagcctgtgatccctgcgttttactggatgttaaataaagatgaggagcccacttgacttcaaggattctagttcatgagcctcagtttccacgtctgtggattgggcccacagccccacctcctagaagcccttggcctgagccccggggtgcagcaggtgggagccatcactccaaatttgttgttgatctttctggatggtcgtctttcaaaggctttatcaacgggcttagcagtgagcagggagtgggggtcagtgtggccatctcgagtgtccccagagtggggagggttcctagggcacaaggctgtagccccccagccctggtaggcagccctgccttttcttccagaccttggggtggctgttgggaaaccttgggtctggggtcattgtgggccccaccccagccacgcacgcctcggctcctcagtttagggggtcctgcttcagagacctgcaaagtcgaatgggccgaacatccgaattggacctgggtctggaagcattggcccgctctccagggtgctgatctgtggtgtcaggtcatgcccccggtgtgcagatatttctggatctccatgacttcatggagatccccttgttgagatacaattgaaagatggcttgggatggcggcgtgtcgcaggccccttcctggcgtgttttgcgcgtgcagtggtggttcctttctcatgcgagggcagaaggtgtcctgagcgcgtgcagtgtcttgtcttcagagcactctaaagctgctgtcagcaccacccgccccgaaaccagccccagctgcttcaggacatgtcacagtgactgtgagtgtgactcagccacctccaaagcaggaggcccccatcgctccccatgaaggtccggctggagacacccccacgggcattgtgtccagccacggctccatctgcggttctcccactggggtgatgctgacggccgccttggggcagggcaggggctgctggggctggaggggcccggctgagccgagtggaggttgcagagctgtggctgcggctgctcactatgtccttcatgagccgcgtgggaaatgggctggagccctggagcccctggagccgctggatcacctttgactttgtgaaacccccttggctcataagccaggctccctggcacttgctgggaagtgcccacgtcccatcccctggtgcgcctctggtggccctgccctcacctgtctcctttccctctgcagatcacgcaggaggccggggaattcatgatcacatttccctacggctaccacgccggcttcaatcacgggttcaactgcgcagaatctaccaacttcgccaccctgcggtggattgactacggcaaagtggccactcaggtaaaagcttgcctgctgggaacgggtcccagcagggcgggaggaggctcttttttgcctctgcagccacacgcccatagctggtccagcagccgtttcgctcagcccagggcctgggctctcaaccagggtctgattctgggctcctcagagagcttttgcccagaacgctccttacctcgaagactggagaggaggtgggcaggtcgggtggacgatggtggcccagggcccatctccagcgagttccatacaccagttatccctcggcctgcgtgggcctcctgggcatggccggctgctcgggtctaggggttggggtgtttcctccaccagcaccattgtcccccctgctggctggctcctgggcatctcctggccatcatggtcctggggttgggttgtttgctgacatctctctcctgggggccgcttggccaggcaggagcccactcaggcatctgcccccctccctccctgctcccctgtcagtggcagtcccccagctcccagtgcctgggtgcttcctgctggtggggtccctggaggtcacggtgagcttagcatgcccgtgggaagactcacagtgagtggcccttgcttgatttttttctggtgattctcgttcctggtctcagaaggccgattattggccagcaattggcgtctgaactgagcgcttgttccccactctcctaacgccacgtacagccatctgtgtggctgttctcgaccatgcggagggtgtgggaggctactggatggataggaagcccacaagagctgctgctgggcacgggtgggacggggtcgccttggctggccaccccctcccccatggtctctgccttggggtcccagtgacggggacgtggacggggcttatgaatcctaagcctcagaaaggggagtgtgggacccgggaagggaagcagctaggaggccgtctgggcatcacaggtctagccctttcctggctgcctgtctggagctgggggctggggagcctcctcccagggctgtccctgaagtcccctgcgtgcttttcctggctgcccccaagtaggactgagctgtcccggcaggccaggctcggccacgtggccctggctcagggctgctgtttctgggcagcattgaacagcccagctcctcccagcccctctgtcttccccgcagagacagcctcagcctcagcccctcccggcgtctccctctggtttggggtcatgtggctgctcgtgatgcagcaggacgggcagcgggctggccagggtgagagcaggtacttcctcccatcgtccctcccagtgcagagccttccagttcctccagagccggggtcagcacaaatggcagattcttctcagatccagatgtgggggaggtgtgataggagagaccacagggccagatccggattctttgactctcgcagcattttctagatgtcagaccttggcctggtgcggtggcttatgcctgtaatcctagcactttgggaggcagaggtgggcggatcatttgaggtcaggagtttgagaccagcctggccaacatggtgaaaccctgtctctactaaaaacacaaaaattatccaggcatggtggtgggcacctataatcccagctacttgggagactgaggcaggagaatcacttgaacccgggaggtggaggttgcagtgagctgagattgtgccctggtactccagcctgggcaacaagagcgaaactgtctcaaaaaaaaatacgtatttatatattatatatgtaatttatatgttatatataatttatatattatgtataatttatatattgtatataatttatatattgtatgtaatttatatattgtatataatttatatattgtatatttatataaaataaattatataaattacataatttatatatataaatataaattatatatgttataataatttatatattatatataaatataaattatatatgttataatttatatattatatataaatataaattatatatgttatttatatattatatataatatataaattatataaattatatgtattatatataaatataaattatataaattatatatataacataatttatatatataaattatatatgtatgtataattaagatggattttggccggacatgatggcttcacgcctataatctcagccctttgggaggctgaggcgggaggatctcttgagcccaggaggtcaaggcatccctgagctatgattgcaccactgcactcgagcctgggcaacagagtgaggacccgtctcaaagaaaaaaaatgaatttcacctgtttcattttacccaccctcccccgcccgccgccccggcccacccttttatagagacagggtcttaatatgttggccaggctggtctggaactcctgggctcaagtgatccacccacctcggcctcgaaaagtgctgggattacaggcgcgagccaccacagcacaccacctctttttgcttttttctcctggctactgggaaaatggaggcagcataggtggcctgtgtgacatctctcctggccacgccggtctggacgaatgagctaacctttatttttctggctgtttctctgccttcaatccagtttagaaaaagaacaggggtctacagcagggaaggcttgagagatgcccccaggactcagttcagaaagtctcgaatgtctctagtgaagactctgggcttagctaaaggaagagagatccagaagttgggatttcagctttttgatctaaaggagtagttaagtatctcagggctgttgctgtgttgaaagggcatgtgtctgtgtgtttgtgctgccgtgaggacaccacgggtgttgtgaccagcccagcagcagattgagctgtaagccccaggcctcgggcttgtcctggaggtgctgtcggagctgaaactgcagcggggcggtggggactgcccagatattaaaagcaatttggggttcagccatgtgttcacaaacaagttggcatttgggaagtgcagacttagattgggctccacgcttccattgtcaggcggcgtagcaagtggcgtgcagcgctcgaaacacaccaggggttccaggcaggcgcccagggcctgggcttcctcctggaccccccagccccgctgtcccagcccctgctcaggcacccctggtgtagtcaggcctggcctgggcggcgagggccttacgcagggagtgtcattagccacaaggcctctgtggccgtcgggggggtcggtggctctcaggcttcttggcggggcagccggcccctgactctggcagggttttctctcccataagcagcccaggctggagagtctgttagagcatctcgccgcacagatgacagaggagtgttagaaggcagggaaacggcccaggtcaggtggggctcgggccttgttcagatcttgtgtgcagccagattggagagaaggggcagcccagaaccccccttttctggtgtccctctggccggcccagctcccctgtcccatttgcgtttcgggccactttgttttgagcacattcttcagaagagagccaaagaggaggctttccaccccctcgatttgcttagagacatttttgcttgttggctgttcaccttccttgaccgctagggacccctgcccccccccaccccgttgtcccctttctgtcatttttgtgctcaggagctgacaggtgaaaagccaccctcctgccctggccgggccctgtgaattttgggtgtctgtgttcacgggttggcaagctagggctcggatctggtaggccgacgctgtgccgtctgcaaactgagcagggggtttacgtcttcacagggttgtgggaggagggcaattaaaaggatgtgtgacctgtgacagccggacgaaactgaaatctcacccacaaatgagcagcctgtgcacagagccacactctggcatggaggtggcgtctgcgtctgcttcgccccgcggagttgagtagttccgaaaagccaagaggcgtgtgctgcctggcccttgcaggggaagcctgtctccccgtctacagatgccagcggggttgcacagctcgcaggacagccacctcctcccccccccagcccccagggcctctgtgggcagaggggctgctccgaaagcaggttggcccccaccgcctcaccacacctcgagccagtgcagctccctctggagttccggatgggcctgcagcagctacagccgtgagcaggccagaccactgccacagatgtgctgccacctgcctgcggagcatccctggctgccccatggcaggcaggaggcccagccctcagcccaggtctgcccccacagggcagagctctccaaggttcccccggctgtaaaatcccagagaaatacgatctccctgcagcaggtggcttacctacttacacagccttggaccagagcctccgggtggagcttccagggccctgcgcgcacacacaggaggcagcctggggctctcccctcccgtcttctgcagagcagggctggcgcctgcctgagctcacaggtgggatggagcagcccaggccggcacttgtggcctaaacacggcctcattcactccccatcagcagaatgccgtgggcacacggaggccattgtcaaggagggggtgggatttattcccgtgggtgtctttcctttctagctggtctgtgggcattcacccttgccacctgtctgtgcagccagtgacatagtcattgcccctcggggcaggaggaggcctggtggccctgtgtgtctgtgtgggggaggtacggctgtgtccccacccccggctctccactcctgctcatcccctatgaaacctggtgtcatggacctgctcccctcggggctggtgacctttggaccccagtggtgacaaccacagaggtccccagacatcacctgcagcgtcccttggaggcaggattggccccagtgagagctgctgcccagggccacttccgaggtcagtcatctctttctggggggtggggtaggtagtgccagtgtcatttttgactcccctgctggtgtggccttctaggcccaggtttcccagcatctcccctctcctgctgagggcccccatctctgagtattccatttgagctgctcatctctgtgccactttttcccaacttaaggcggctgagctctgcagcggtctgcagcctcggtgtgcgacgtttcttaagcacacaggtgttaagtatctcagagccatgaaactctctgccttgcctgacagactcccaccttgaggatggaccctggctttggggctgggatttcattcactgcactcgagtctctggacgggggctgggctgttcggagggtttggggagtgagggcaccgggcagcacaggtttaagtctcctgtgtaggaatctcacgtctttcgggagctaaatgccaggcaggaggttgctttcccctcagaaactagaagttcttatccaacctgctcttcacgcccacctgtggggagagaagcccattccttgtgttcactgcctgccggagagcaggagggagcctgtttcctcgtgggcgggatgtgccccccgactcgggtaggcccgagcatctgagggcccccaagggcccatcgttttcagggtgaccgtccacacctgcaggggcagggagtcggcggcttagcttcctctggagcacggttccatcagccagatgcgctcacatccagctcttagcggctcctgcaaaaactcgctctgatcaaagggaggtgagtgtaaaaatgcggcccgggctttgtctccaactccccccgtgattcctggaccacgcaggccatatcactcggacaccacggatacaaaccctcactcccctggcccctagagctgagcagagcgctgggttcgacttccatctagagcagaggtcgatgggggggaggttgcccctgcccacagctccacccgtgataagtaggcaggcttttccataattaatcaaaacctaggccgttcatctgtgggccagggctgagcagagaccaccggagtccctgagggggcccctgaggctgcaggggacaggccaggccccccccctccccccccccgcaaaagagcaggttgtggttataggggcaggatgacagtgggagattttgacatcctcaagaggcagaggagcaggacgcccctgccagcttcatccgcacatcccttggggcagatacagaaggaagaatgtgcattgttggaaactggggaatacggtaaacaaagagaagtgggagctgaccttaccatctctgccatccgctcagccatgagaaggagcaaggcccagcgtgggtgaaccctgaggacaccccgctcagtgagagaagccagacccagaggctacaccgtgcgagaccccatttctatgaaatgtccgggacaagccagtgctcagaggcaggaagggatgcttgggtgtgggggctggagggtgacaacggatggggacgggttttctttggaggatgaaaatgctctacctttgatggcgaagatggtctccccactctgtgaatacacaagctcctgcgtcgcacacctggtgaattgtagggcacacgaatctcactgaaactgtccagaaacatccttcccccagatcagctctcagcaaatcaggaacagtaatccagaataaaaactgggcagcctttctggaaggccgtctgccatgggttacacatgtgtctcctgtggcctagcggttctgtctctggaacacgtgcataccggttccatgtctagggatatctgtagccccgtttgttgtagtggaaagttctatgaccaggggatgggttgaaccagtggaatgttatgcagctgtgaaaatgggtttgctccatgaggtttgctctgtatctttgggcatggagagatgagcgcgacaactttaagggaaaaaataggctgtggactgggactcttgtgattcccgttttttgtggggatgtggttcttgaactgggaaagggagatttgcccaagtattggttgatattagtttgatgtcatggaatttgggataccttaaaaatatgcactaacttctcaatatggttctgtctttttttgtactaaaaaaaaaaaaacccacatactcctctttccatagtcagaggggtgtagctctggggagggaagagtggggtccgccattcctaggtgcttcttgagcaagcaccccacagttcccaagtggaaaaggtttttgttgttgttgcttcgttggtttgttttcagaatgggagttaaaaaccaaacaaaaggccaagcgcagtgactcatgcctctaatcccagcatttagggaggccgaggtagggttgcatgattccagaggttcaagaccggcctgggcaacatagtgagaccccattctccacaaaaagggggaaacaagacaaaaacacaaaaactgtgaagacccccaaagcctggcccccttcctccctgctgagcaggtgaggcagtgctggaaagaggacagagtggaaggtcctggaagcccagcccagcattgctgagcgcctgccgtgtgcaggggaggggtcctagcccctgggtctgccagggagaggtgagagtgcagaggacagcaggcttgcctccctagccacacacctcgctgcatgccctggcctcgccaggctgaggcttagggtgcagtacccggttcgttttgagaagtctctttctcagctagagctgtctcagtggtaacgttctctctctctctctcctcatctctctctccccccatatctctccccctctctctctctctccccctctccccctctgtctctctctcccccatctctcttccccctctctctccgcctctttctctccccccctctctttctctccccctctcgccccctctctctccctctccccctctttccccgctccccctctctctctccccttctctttcccccttgctctctccccctctcccccctccctctctttctctctctctctctgtctccccgctgcgcgcgtgcgcccccctccggcccccccttccccccaccgccgacagtaccaccctccatcaagtgccgactctgggccttgtcaccttgggaggaccagagtagtgcagtgactttgccaaggtcacacagcaggaggctgggcccagcacaccctagaccttcctctgcttcccttgccccacttggaggcacaggccgatggggcatctgggagcccacaccctccctgcccaccaggtgtctcctgggccagtggcttcgtgtcctgggcacgtgtcctgtgcacagcccggtgggggcagctggaggggtctccaaggcggcggcttcctgtctcagagcaggatcccccggcatgtgctccagcaggcaggctttgtagtgggattactaatggggcagatcaaaaggatgttcctatttcactcaaggaaataaaatgtgcacgcagccgcctttctcacgctgaactcaagttagtcctacaagcctgcacgccatgttagattagctcagcacgcggccgggctggccccgaggtgggtggtgcctggtgctggtagataagggtctctcctccagagcccaggactcagcggcatcccgaaacaccctgccacggggagagttgactgaggattaaacagagcgcgagagatgtgaagcctggctggaaggctggggagccactcacgctctcttaactggttccctgccagctgtctgtgggtgaggcctgctgtgtgccagcctccccggggacatctcgggctctctggaggtgtctggcagggagagcttctgctgagcttgggaaggggacgatgacttggattccccagaggcgccattccaggaaacggcccactcggcaccacccatctcctcccacctccccgcatccaggctggatgggggctccggcaggaaccaggcctctcctaaaaccccagccctggggtgtactgaacttaattactgtaaaattcaaaccaaattgtttctgctgcctgggagaactgtgtgttccttctgtttggtaatgaggctgcctgctccaggtgattaacccggagcccagggggagggagcccagggggaggcggcagaaggcaggggctggggaagggtgggagggaggagggcccacggaggtgcgggaaactccagccactcctctgacccgctggagcccacggctggcctgtgccctgcctttggcttcctgcctcagtgagcctctgatttatggcgttgtggggctggacgcatcgtgtgtgccgcaaactgctgtgtgaaatatgtctcccttgctcttcccagatcttccctgtcactctgaccctggtgaggcctttggggccccttcccatgtgtgggcttagggggtgtcacagtcacgcagaagcgtggggagaatctgcagctaagaccaggcggagcggatcccgggccgggccagaatgagtgggtcccatgctggctcttggcctagtgtttatgctgcatgtctggagggtgatctaggagaggagtggtctggaaagaaggcctcgtttagtctctccctcggcactgcggacattggggccgtatccttctctgggctggggccgtcctgggcactgcacggtgctgagcagtgcccctggcctccacccactccatgccaggcacaccccaacccagctgtttcaaccacaacatcggcaggcacatccactcccatgggggcagggccacccattgaagacacctgggtctccaggctccctgcgggcccttccttcctttctcccactgctctcggctttcgggatcacgccctctaatacccccggttctgctgcccaggagctccgggggggacacatctccccagaggagggtcgggggcttttctagaccgaggctcgtggtgtggctcgagggcctttgccagctcggcagcccccagtcttctctaccatccttcatggacagagctggttcgggggctgcagctggttgctgcctggcatcagaggagcgggtctgcttacggggtcaggcagaggcaggaccccctcgaggggcactggcgagggagcccaggggtcagccgtcagagaagcaggagagtcagaggagggggctcgcagggcctggccctgagtcagaaatggtggagttctcccctctgccatctcagggcatcccggctcatggctgttcctcagccgtcgtggatgagtcgtaacctggagagtgagagagaacctccaggggcaactgctggcaaggagggatcaggggaggccgggcccctgtacccctgaccacatgtcctctccccacccaaggtgtgacccttcatggggcctgtggttcatacctggagctgtctgcctgggtgcagaccctcccctcctagtgctctgcctcagtttccctcctagggctgttggaagtgacatggaacagcacttgggtggtgcctggcacagaagcaggactgctgtggctgttgaggccccttcagggcagcatgtggaggagaaaggcaggtcctggtggcctggggtcaggtgtgcagctgcctgcttgtcatgtccctgcaggggctcacaacactgatagactcgaggctactttcatttagggagggccaaaggggacatcggagcctccccaggcacctggtggatgtgtgggcagcatggaaggctgcggaaggccatggaaggcccgtgaccttgcctggcctggctggccgggaggggcagggagccgctttctgtgctgccaggaatggccccgcagccgaagcccagggagccctgggagccggcgcctaattgttttgttgacgcggctgccgagcacttccagtaggtttcctaatgaactggtttgttatcggcctcactgcagcgctgataattacatcagaaacagggggcccactcgtccttcccacgcgttctgtgagccatcagcgcagatgcgggcgcctctgccccttcctcggtgtttaacgctttgtgtgccaaggcacctgccacccacacccaccccagacagatggtcgagatggctgtgagaggagtgtgaccgccactcgccccggttggtgtctgcttggcagtggtcaccgcgcaggtcactgttcagctgctgggaaggcagtggatgaggccatcgaggtccagggaggagacaggacacgaacaagggtggaaggaggaatttctgctcctagagagggtgcagggacgctgcagctgcggcctggtgtgtctgccacctgggtagcccagtccacagcccaggcagctgaaagcaccagacatgtatcctctctcagttctggaggcagaggctgagatgggtgtgtggcgggccgagccccctcagggcgccagggagaccaccctgcctctcctggcttcagggctggccgagatctcagggctgcttggcttgcaggggtgtcgccctctcctctgccccatggtcacgcggcccctcctccctgtctttgtgtcctcttgtctgcttctaagggcaccaggtgctgacccccggcaggccctgatcccatatgtgaatcatgcactgatgacagctgctaccaccctgcttcagaaaagctcctctgtgaggccccgggtgcaggatgctgagtagcgcggggaacagcactgctggggaggaacgaaaattgcgaggtccctgagcgggggacctggcagaggccaaacgtcagaggtcgggggctgcagtaagggcctttgaagttagatttcatcaccatgtgcgggggggaggcactgggcatttcagcaagggagaggggccactggctggagaagggactatgggagagatggggcagggagcccggcgtggatggccgccgtctagacgggcatggggtctgtgggcgtgggaagaaggggacagcgtgtgcctgtgttttaggggtggtgcctgtaggacctggtgataggacagaggtgggggcacaggggaggggtggggacttgggcatgtaggtgtgcggtggtgctgggagcgcacagagggacatggaggagccaggactgggtgtgctgttgagatgcgtcagagcctgccttccagtgtgggagccacgggccacacgtagcaccgtatccattaaccaaaatgaaataggatgaaccctccactcctcagtcaggccagccgcgggtcaagccctttgctaatagccgggtgggctggtggccgtgtcctgggcagcgcaggtgcaggtcatcgccgtcaccacagacagtcctgtcaccgtgcagctgatgcgtcctgtggaggggtctgcagctcgggggcggcgccgggggcggggcaggggcagtgtgagggatgggacgtgttgagccatagatgtcctgtcggcagctatgagatgctgtgccctccccacgccaggatcgctgtttctaaggcccctgcccgtccccatccctgtccacagcagggcaagcaccagccatgcaatgtctgtcaccgtcggctgtagaaccgcccgctggtggctggcattgtcctcaatgttccgccctggttcctggatcagggggctgggagttggcgctgcagctgacgagagcattcatgatccccgtggtcagatgctatttgggttgatgattttatcggaccacatataatcattttctcattaggccggtggctgtgtcttctctctgccactctactgttttacatgagcagactctagtatctgttcaggcttttaaaaaagagatggcctctggtgaaagctcagtgctgtttaaatcaggaaaggtggcagatgagccccctgggctccaaggcagcagtggtagcccactgtgtctgcaggtggccagggtcctgtgatgatgctgccagccaggctgctgcacactgagagctgggggcccacgagcctcggtgctggacgcccccacagtgtggatcagatcgcaaggggctggccagggcagggcagagcctgctaggaggagggagagggctgggagcagccagggtggacccctcaacctggatcagatcacaaggggctggccagggcagggcagagcctgctaggaggagggagagggcccggagcagccaggtcggactcctcaacctggggaccctcccccagcagctgcaggcttgagtgtgtgcagcacttatgtgcgagcatgtcgtttgtgtgtgtgtttccctgggaatcagaccctggcaggggcccccagtctatagagtgggtgctatggaccccagccgctgtgaggcagagtgtgcgccccaccaaggggcaggctgccgaaaagtcagcttcacagggagcttgttttaggaggaggtccttgtgttatggaaatgtaggccacagactgaggcgcacacagggccggtgtacagtgtggggaatctttttttttttttttttgaggtggagttttgcactgtcacccaggctggagtgcagtggtgtgatctcggctcactgcaacctctgcctcccgggctcaagcgagtctcctgcctcagcctccctgagtagctgggactacaggtgcgccaccacacctggctaatttttgtatttttagtagaggtggggtttctccatgttggccaggctggtctggaactcctgacctcaagtgatccacccgccttggcctcccagagtactgggattacaagcgtgagccaccgcgcctggccatggcgtggggaatattcacaaccctaccccatccggactcctggcagcatggagtggtgtcaccttggatggggagcacggtcccaggtctccacgggcttgggcaacccctggggttcctgctgacctcagtgcccctgcccagaccccagtttctcacttccgtgcgatgtggcatttctacactggagtcgctggtgacatcagtggcgcctgttgccgcggtgcccccggcggtgtcggtggtgcgtgttgccatggcgcctgcctggtggaggaagtgtcccgcggtgcccccggcggtgtcggtggcgcgtgttgccatggcgcctgcctggtggaggaagtgtcccgcggtgcccccggcggtgtcggtggcgcgtgttgccgtggcgcctgcctggtggaggaggtgtcccgcggtgcccccggcggtgtcggtggtgcgtgttgccgtggcgcctgcctggtggaggaagtgtccctccgtttctggatttgccttaatagctcagagaaggctgagggaaacctgtgagtgattgtaaacatcccatgctagggaagggcttgtgaggccacacagggtggcttccaccagaatcgacactttaaagagcacgggctggcagcatgtgtggtgtggagtcagcagggcggggagaaaagaacaaggcacgtgccccatggccatcgggtgatggggatggtgcctgttcacgaagaagagtcaccaagggaaggaggtgaatggtaaccaaagccaccaagatgtcaatctcaccgtacacaggattcttaaatatgtagtaaaaggctgtaaagccccacgtggcgcatcagtcggccatccaggcttcgtggttttgttttttgttttgtttcttgagacagtctccaaaaactccagattggagtgcagtggtgcgatcatagctcactgcagccttgacctcctgagatcaagcaatcctcctacctcagcctcccgggtagctgggactacaggtattgcaccaccatgcccagctaattttttgtagtttttgtagagttggggtctcactatgttgtccaggctggccttgaactcctgagctcaagggatcctcctgccttggcctcccaaagcactgagatgacaggcgtgagccgccgcgcctggcctgtgcaggccttggtggagctgctccttcggtcctgatggggagcatttcccaaatgtgccccatggaaaaggcaaggcgcagagcagggaccgtaggatgtcattgacatgaaaagcagaggaccgctgccctgtgtgtcgggaggctggggcctcagggcagagagcgcgttggccaccttcccttttgttcttctggagctgggtactgggtgcagtgttggctgttccagaaagtctatgagttctgtctccgttttggcttggagttctcctgtgggaggtgcccagcaaggatgattcccctcggccaccagtgagatgggaaccctcctcctcctcagctcagcagagccgtcgtggacctggggcccccagcttctttggatctcaggcatggggggcgcaaatgtcagtcgggagctgtcaagctctgtggaaggtttctgcatgtttgcccgagccccaccaggaggggcttcaaaagtgcttgtccaagtgcagagcaaggcagggcacagaggcagaggcagacacagcccccagctgggccagggctggtggccaaggggcttcctcagtgtgtagcctccgtggcagcctccatgtgtagtacatggtcagtagaagccccattaacagcaggggggactcggcctctggggagcggatttcttttgcaatatgatgttaaaggaaggtctggcattcagtatgttttttattttattttttattacagtttacaaaagcactccagtttcattggatttcaggcattttgcatgggatcgttatggctcagaaggcgtaatctcaggcattagattagagtgacaggcttgggaattcagaccggagaacagctgccctgcctgttcccttgtaggtgactggcaggtcttgctttataacaggaagtgctcccatggtggccctgacttgcccagcctgtggggtttgcttgtgttacctcatttaaaacccctggcagcacgaggttggtccatctagttccctagaaaggtgccatggactgaaggtctgtgtcccctcagagtcatctgttgagtgctcatacccctccctagggtgatggtattaagagatggggcctctgggaggcgacgagggcatgagggtgatgccctcattgatgggatcagtgcccttatgaaagagcccccagagagctccctcgccccctccatcatgggaggactcagtgagaagatgccaagaatcaggaagtcaccctcaccagacaccagacctgccagtgccctgatcttggacttcccagcctccagaaccataagaaataagcaatttgcttatgagcccccagcttatggtattttgtttcaataatggactaagacaaaaggttcattccagtcacttcctcacatgccatttccctcatccctgcctccaaggaatgtgcagggtggatttctgagcctttagttgctgctttctttccttttggcagagatactttcaggggaacctggtcacatagaacaacctccggttccagtagtgctgggcacacactgggtagcagtgggcagtggagaggattgcagggcaccagaaggcccatttgtttcctttctctttaaacatgatgagcaggtctgtgcaaataccccaaagtccaaggatgctgagaggccaaagaaagaagctggcattcagtttctcagagagaaacatttaataaggatttacaacgagaagccatgtctgtgtcttgggtggcggtagtgagacaagacggtggatccctgcaccatcacccccagacccagggcttatataccatagggaagggttgttttgggatgtgcaagacaattgaaatatggaaacctcaagggccatttgaccaaagggcaagatttacagtaagtacctgctcttatacaaggagcagtagatgaactggaaatctcagaggccttcccagaatgggggttaatcaaaagccaacatggcaggttagcatccaagatggagttgctttggcctccacacctgctgtgacctcatttctgagagacatatgctccaggggcttcttgagaaaggaacacaggcagtaaagttttgagacttttctcatttgaaaacagggcctgagggtggcaccctcatggaggagatcagagcccttataaaagagcccccagagagctccctcaccccttctaccagaggaggacacagtgagaaggcaccatctaagaaccaggaagtgaccctcaccagacaccaaatctgccagtgctttgatcttggactttccagcctccagaaccttgagaaataaggaaagggcagaatttgaaaatgaaaccaaaaactccacaggatggttaggcaacaaagtagaagaacttgtgcaggagaagctgctgtctgggtggcggatagtttggctgggtatcgaagtcccttcgaaggctgcacccatccgtggttctcattcagtgctgctggcacaaagatgctcctctgattcctcatccttggtgtgggacctgtttttctcccttctggaggcttattgaaccctttttgtgtcccaagtgtcctgaagtcccctcattgggtacctgatacgtgtctgatttttgtcacttgcccctccttgggcctttccatccatcttttccaacctttcccatgattctggtaaactttcttgaatggtttcattgattatttgctctcctgtctttcttgtttctatttcaaactcccatcactcgctattgggctttcagaactagtgttccactttatcttccccacctccgttttctacgttgtcttttttgtttttgttgttgttgttgttgttgttgtcttcaagacaggatctcactctgaaatgagacagagtctcagcctagagtgcagtggtgcagtcatagctcactgcagcctcaaactcctaggctcaagtgatcctcctgcctcagcctcctgtgtagctcggactacaggtgtgtgccaccacactggctaattttttgtagagatggggtctcgccatgttgcccaggctagtcttgaactgacctcaagtgatcctctcgcctcggcctctcaaagtgctgggattaaggcgtgagccaccacacttggcctctttgtcttttttattaatttgttttctggaagagttcctcagcttcctcacttaacctgtctattgatgtgtttttattggtgtttttcatttctgcccttttttgtcttctgaatattccttttgttataagccccgttcttctttcatgatgtagtatcttttatttctgaggatattgattgacgataggtttaaattctttttgaaaatgtcttctctggctggacacggtggctcacacctgtgattccagcactttgggaggctgaggcgggcggatcacctgaggtcaggagttcaagaccagcctggccaacatggtgaaaccctgtcactactaaaaatacaaaaaattagctgggcatggcggtgggtgcctgtaatcccagctactggggaggctgaggtaggagaatcacttgaacccaggaggcagaagttgcagtgaaccgaggttgtgccattgcgctccaacctgggcaacaagagcaagactccgtctcaaaaaaaaaaaaaaaaaaatcttctctgtcctctgtttcttaccaggtttttgttttttttttgatagtttattttgatctctggggatcatagtgcaggcccatctctctgatgcttgggggtaacgatctagtgtaatgattacaagtgagggactaggtgcagtggctcatgcctgtagtgcagcactttgggaggctgaggcaggaggattgcttgagcccaggacttcggggtcggcagtgagctgctgtgatcacgccaccacattccagctccagcctgagcaatagagtaagactgtctgaaaaaaaaaaacaaaaccccaaaacccaaaaaacccaagtgggcaatggatgctggtgatgggttgggatgcaaggggatagcggggagggcctcactcggtgctttacccggggaggtctgggtgggctgtggatgcaggggaagggcggggagggcctcacttgttgcttttcctggggagatccgggtgggctgtggatgcaggggaagggcggggagggcctcactcggtgcttttcccggggatacctgggtgggctgttatgggggagcccacatcaggccctttgggtctctccccttgggccagccggattgcacagggagtagccctccagcctcctgcctgggctcctaagggtgtcacccacatcctccactgtgcccagtgtccccagcccagacacccaccttctctggcctccccagtaaatgatcctagggagtccagcgaggaggggcaggcggccgccagggtgccaggaggggtcgggtgctgcggcagtcctcgcgcagacctccgttttgagcacccccacccttgtttccaggggaccctgggccatgaggcgtggggtgcgtgcccgccaccaccatccgtgtctctgctgggaatggctccctggtggccgtccgtctgctcgccacgtcccacccccagcctgctgtcgtctccttttccatcctccctgtccttgcaggtgtgtcctccctaaaggcactttctcgtggcttcaggagagagatgggtggcgtgggcttgccagcctaccaaggcatcacttagagccaggagccatgagcgtggcctccttcctgcagttgcctctggctgcccaggagggatgtggtgttgcctggcagggagtggagacagtgaggccttctaggggtcctcccttgaagggtcagcagaccaatgtggaagtcaccaaggatgaaggccagagcctgggggagggtggagctggacacccctgggaagtctgggagaggggctgagcctccacaggccaggggagcaggggaggaatggggccggggccggggtggcatctggggccactcccggtctcttgctgttggcgttgggagggatctcgcaccacagcagggaatcgaggccccggctcccctcaggctctcccttcaccggcaatgggcggcgggcgacgggtgacgggtgacgggtgatgggtgcagcacccgccccgcccataggagagccctggtccactgtggcctgtggatgccgcccctgacgtcagcatctctctctggcctccctgggagcagtctcagagcagtgaagagctcttcacgtccggtgctgtggcgatactaagtaataagatctccaggttttattgggcattaatatttattcccatgaaaaggttaaatttatttcactttaaagccctggagagtgcaaggtggagccatagtcgcctctcctggcaacggccctgcccaccacgtacccacctctcccacacaggccagtcctggtgatggcctgcaggacagggcagatgtgtggggcagttgggggcacccccttttggaaggcactgctgccagtggggccggtgagtgtgcagagcccagggccaatgtgtgcctcctgcaggcaccgggcagccctggccactcctcagctctctgaccccttcccccgctctctgcagcaggcaccacacgagccaatttcgcttggcacgacgtcctgaagcaggccctgggctctgcggctgctggctctgagcccatcgacattctgatttgtattttttcatgctttggaaaaaagaaatctatttatctctgcgtcgggtcccgctctgcataaccggaggcaaaccagcagccccgcccgctttctcattttcctgggaaggtagcagcgggtcctctgaggcctgcgtcaagaatatcgggctgtcggacgcgtcagtcttcaggggcaggtgacggccgcactgcttccagctctttggcttggtgtttgggcaccagctgacgggccagccagcagcagcggtgctgaggttagtccaggtcccctgaactcgacggccatcaatcccgggcctgtcatttgcaagcagctgcagcagctggtcgagcctcctgctagaccctctctccaccccaggtttttcttaagggtctgtgacggtatctgtcagtggagactcatgttagccatgtcaggagggcctgtgttggagaaggatggagggaacagccccgagcccagggggcctggcttttgctctgtgaggctcgctccacaccctgttcacttcctgatccccttccccaccctgccttggtccttaaggaggtgaagatggggcacgggggtgcacggccacctcctgtagaaccagggcaggccagccaccttctgagtagcttccgagctcctgaggcttggccacccgcacatcatggggtgggtgaggagcagaaggaggggccctccccacggctgcctgcagtctggccctcccctttttatctgggaaaaagtgtcctgtggctgctgggtgggtggcagggaggctggccgaatccctggccaatgagtcccgctggcaggaccccgagaagcagaggagctcgctccagctggtgcccctccaccccggcagcagcaggacgagcaggcgtgccagcacagctcctgggcacctgcccctttctgctcccgggtcccctggcttctcatatgtgcttattttgtctcccagttacactgtgagctgcttcagggcagggcccagcgttgcacggtaaaactacattaattcagactcattaattcagagcctataatagttcagacatgggagacgtgactctttttgagctaaaagttggaaaccgttttgctctgggtttttatggccacaattgcagaacctaatctaagatcagtaccttttttttttttttccagcaactaaaatcttgggaaattaaaggtccttaaaacatgctttcaattgtgagccagacagttctgaacccggcaaagagcaggcacagggatgctctgtcttggaagggggttttgtctgggaacgccacttccaggattcagacctcatgtgtgtccctcgggagcttccaaaataggactgcttttaggtggagcgtattggaactgatgtcagtgagaaaatggacaccctcacaccccccaaaaattagaaacagaagacctcactcctcaggccgtgcctcttctcttccccagaccctgggcaggtctcagcaaacccgggagaaccagagcctgactccaggtcccaaagttgtcatttcagggacctgaattgctgttttctcccatgtatgagtgtctgggctcattaagataactggggccatcccagccggaatgtgcaaagtccatgggctccgggagtttggagctgggtcaggtggtgaggccgggagagtcgcaccccctgggctccgtccgggcagcaggatccaggtccccatgaggctgaggtgcaaatggccccgctccctgagctgcccctgagttctgggggcagcgtgcccacagtacatggctggcttgggctgatggtgcagagggcacaggacccagagcggggcagagcaggaggccaggactctccatgcctggagccggactgcttcccggcaggggcagtcagaggcccggaagccggtagtggggcgcgcgcagctgccacgctcagtacaaactgggactgctgcccatgtctgcaacagacacacctgcgattgctcccagagtgtgctgaagctggtctgtgggacgtggtgttcaccccgatgctgttacactgcgagttacactagaaaagttacttcatgacttaagtcaggcttcagcaagctttttcttttgagacagggtctcagtctgtcgcccgggctggagtgctgtggcatgatcacagctcactgcagccttgaccgcctgggctcaggtgatcctcccacctcagcctcccaagtagctaagacagtaggcgtgcaccaccacactcacctaattttaaaaataaatttttgtggagacagcgtcttgctatattgcccagggtggttttgaactcctggcctcaagcgatcctcctgcctcagcctcccaaagtgctgggattacaggtgtgagccaccatttgagccagcccaaacttattgtaaaggacctgatagtgactgtttgcagctttacaggccgtgcattccccatcttgaatgttcagccctgcccttgtagcgtgaacacagctgtggatgatacataaatgaatgggcctggctatgtgccaataaaactttattcacaaaaacaagtggcaggccagatgtggcccatgggcccaccttagaggatatgccttctcaataaagagatttagagaaataagtagcgcagaagtgtttactcctacaattgaaagaaccacagttattgttttgatacatttccctgtcttgagagagctctgcccataattgggctcttgctatattcatgaccgtgcattttgtgtttcttcaggtaacagacacatcctgaggacgtttctgtcattgaaagcgtcctgtagaccgcatcttgccagcgcacacctccctgttgtgtgtcgtttatttagtctgtccacgatggttgaacggtttggttagagtcattgtgtgtgtgtgtgtgtgcgcgcgcgtgcaagcgtacttgtctttcagtacaaaagcaaaggacatctttgaattccttccttccttaggcgagatcgctagcagggggagattagggatgagcttgcctggagtgtgcaaagatccacgttgcacccgtcatctgcagcttggaagagctgctcagctcctccttgcatcctcctgaggccgccagggtctgctccatgctcactgggggccgagtaggggccgtgatgctgacgcaccctcctcctctgggggattccgcaggacccagcagccacccggcagccacccctccctctgctgtcactagctttgggcagcgcgtgtctcctgcgtgcaggagcactgtgaagcctctgctgattcgctggcaagcggcactgtccaggcccccagaggtgcacttggcagggtggtcaggctgccccctgacatgagcactgtccaagaactgggttctgcttggcatctggggcaccaagagggggggccttgctttgagaccctgctctgcgggccttagccaggaatgagaagaagcttatgggttccagcccagcccagagcagtgagaccaggatcttaggactggggagaacggtgggggcagagagcctgcagttggtgggcccaacctgtagatgagaggctgaccccaaggcagggcaatccagggccgtgacctgcagagaatgcggcgtatttgggaacaaagaccctcagtggagactggcagtgggaccctggcttcatgctccgcgttcctcacctgagtccccacctcctggtctcggacctccacctgtccccagaggctgttcagcactgagggggcaccgccaccctgcgttggccagatgcgcccagcttccccggcagctctcagggcggcctcacccatgcacacggttctagcggccatgtgtatcacaccacacgatgggacacaggccctggggcgtgctcaggcctttgggggccgcgcagacctcctcttgccctgtttgtgcctgatttctccatcagaaactaatgacacagccagattcccccggatggtgccttccttatctgtcgcgagtgctgacagaggaccaccaagttgggcagcaggaattggagcgggcggggcctgttccctccagtcactcctgcacagcctcacagacacccgtgtcccagagagtggggagctagacagggctgtggtgagaacagtcaggggcctggctaatgaaaatagacagcgaggtctgccctgccggaggactctgtggtgaggctccctccggcctgctctgaacccttcccagctgcagtagaacagcccacagaagtcctcatgggcctggctcacccttttcatgggcacgtggctcccacaggcacgcagccgatcagaagaggccggagttggtggctcgcagtgggggctgggcatgttcagcaggaggctgctgctaaggggagctgggtctcctcaccagccctagcgggtttctctcccacactgtggccctgctgagctgcccagcactcagaagcgactaccctgtgtcctcgaaggctgtgcttccctccctgtgacccaccggccttgcctccttcctgctgtttgcttcttgggtgtcctggctccccagctccctgcagagccacgtggagacttgcaggaatgctcccagccgccacctccttccagtccagccgtgggcagcctggcaccagcagctttgtcctggcagtggcagcccctggagcaggggatgcatctggagccgtgccagccccagccgggcaagggggctcaggccgtgctccaggccgtggcagtgcactccgtggagcgtgtctgcctgtcccccctccacgggtgcacacaggtgctttttttaattaaggaaaagcaattgcaaagccgctcaatacaaatcccctaagctgctgtggatggggatgccggggcagtcggcctgtccaggagtctgaaacgccggcaccatctgtgttcctgccactccatggccaaatgacaccaccagcctttctctcctgtgctatctttcattaaatgaattgagtttgctgggaattgcccagccacaaatattccctcctgctcagcatgataggaatctaactgttcccaagcccctgctcctggatccagcagaaggttccatggcccccctgggactgggtaaggtggggggaggcacgagctgcaggaaattccacaggaaggtttccgtcgtccccaaccccgtcagatttggggtcgtaaatatgtgagtgtctccaagcaaagtgtgggccacctggaaaggtttgtcagggcaagggaatagttgcgttgaattaagtctttcccttcccatttccttcatcccattgagcacgggtggtgacagcaagacaggtacttgaaatggaagagtgtctcacgatttttggaaatgggcttcttctgtgcctgtttgatggagaggcagaaagttccctgtgggcttctgaggctgagataagggttggcagaggtcggggcagcctgtgtctggcacgcggtccctgggcccgcctctccccagcaggagatgaggtctgtgccccgttcagacgggggcccgtgcctctgccccccacgccccgagcttccgcatggccctcccccatgcctgtggagactcccaggggctactttgtcccctagaatctagaccagcaatttccaaactgctgcccgcaggtcaactctgtccctggcctctgtttattaataaagttttattgacacacagccatgcgcatgcatgtgcccatcatccgtgatgctttagaggcacggtgcagagtttctcgaagctgaaaacactcagcgtttgggcctctgtgacagttggccagccctgccctttcccccttcctcttgaggttggggtttttccagccccatctcagcctcatcccagtaggtacgtgacagaccagagcttcctggccgcctcctgggatctgagtgccatggtggtaatcgccgcttgggcatctgggttcatgccctctggggcctggcttctctggccccaagtccctgaaatgttgagcatcaccaggtcacctgcagaacatccttcccagtgcccagtgtgaccaaagtgacgcagcggcagagccaccaagaacagtgacctgggaagggctgagggcgtgagagcggcaggtctgcccggcaggcagctggaggggacttcaactcatccttgccactcgcttgacgttcccaaacacaaggggccatcctattgggtgtttgctcaattcccccaagaccccaggcaagccggctgcagcacatggcacgttaatgtcctttcttagccgctgagtccctgagcctcccagaccctcagcatcttcttcgttaacattgtcgtccctccagccctgcaagctggaggcagtcaggtgaggcgtgcgggagcctgtgggccaccgtcgccctcgtgaggcctcctgaggaggggccgttgtcacattccgggattcctgttggttctctcagctctttggggactgctgttgtctcccttcttcccagccctcttggaacgattgctgttataaaatactccgtatccatttttacctacctgggggcacccgcgtctgacgggagggagatttttgcctggaccaacaggaggcatctgaacctcagcctcgctggtctctggacagctgtgcgtggggcagtgcccagtcctgaacctcaggcccctcactgagctgcgcccagcccccatttctcttgggtgtttgctcagtggccgttccaactccgtggaggcaaaccagggactcacaactgggggatgccgtttcctgacttgtgatagaagttctagaaacagagcaggagtgctggtgcacacctgtaatcccagggttttgggagactgaggcaagaggatcacttgaacccaggagttcaagactagcctgagcaacatagcgagaccccatctctaaaaattctcttaagaattagccagatgtggtggtgggtgcctgtattcccagctacttgggaggctgaggcgggagaatcgcttgagcctgagaggtcgaggctacaatgagccatgattgcaccactgcactccagcctgggcgacagagtgagaccgtgtctcgaaaagaaaaatgttctagaagcggaatgctcagcggtgggatggggtgtgggaggcccgggccgtgagccctacctgctctggggtggggtgtgtggagccagccgtccaggtgtggcgcgagggctcagaccgtgtcccctgccgcagtgcacgtgccggaaggacatggtcaagatctccatggacgtgttcgtgcgcatcctgcagcccgagcgctacgagctgtggaagcagggcaaggacctcacggtgctggaccacacgcggcccacggcgctcaccagccccgagctgagctcctggagtgcatcccgggcctcgctgaaggccaagctcctccgcaggtgagttgccaagggactgccgcgtgactgcccagcatcacggggggtggccctgctgggtggcccaggccccttcccactggcaggggctccgggccgtgtcccactcctccctttcttcctattcccaccccgcctcctctttcgtcctcctcctcctgttctgtttctcctccagtctgaggcacagtgttttctcgaggcctcgctttgctggggtgggtgggctctgctctggcgggcagcgtctgtgccgttcacacccgcgggctccccatactccctgtcatgtccccgccaggaggctgaccctgggtggccccaggccccgtgccattgcctcagcagagccaccagccacatggctccctgtccctctcactcaccgcatttctgctgtccggctactcgggcccctccctggcgctgagagcagtcgggttccctgcaaggactcaacggggcatcaggtggggctgcttggatttgagatcgtggagaggatttcagaaggccggccccggggcgtgaccctggatgccctcctcccactcagaacccctccctgcgtatcgccgcacagaccctcccagccaggtatctggtgtccgcctggaggagaggccaaagcatctgcagcctcttggcttctgaccacaagaggccatggggacacggaggcaggtcccggcctaggaggagatccacttcatgcccagagtgaaggcgagcaccggcctccccagcccctcctctgggaagtgtccaggcttccagggctctgagctgcccttggcacagttgtcgacagatctcactcctgtttggtgcccaaggaacattcagggagcccctgagcatgagctggagccgggagggacggcacagagtgggctcagccaactcctccggggaagggccagagagcaaacatttgtgacttggcgactttgcaggccaggcctcctgtgtctcgacgtctcgactccgcatggcaactcaagacccttgcagatgatagacagcgaagaaatgcgcgtggctgtgtccgtgaagctttgtttacagaccctgaaatccagatctcatgatttttacatgctaccaaatacgataatttttctgttttgagccacttaaaaatgtgaacattggccaggcacgatcgctcacacctgtaatctctgcactttggaggccaaggaaggaggattgcttgagtccaggggtttgagaccagcctgggcaacatattgagatgccatctctacaaaaaatttaaaaatcagctgggtgtggtggtgtgcgcctgtggtcccaactactgagaaggctgaggcaggaagatcacttaagcccaggaggtcaaggctgcagtgagccgagattgtaccactgcactccagcctgaatgacagagcaagaccttgtctctccaggaaaacaaacaaacaaacaaaaaaacatgtaaacactgttcctagcttgtgggtcgtacccagacaggctgctggcaggtctggtctttgagccaacagtggtggccttggtgtgggggcagcctcccccttccctttgagcagtgaccttccctctgcagccatccagtctctgctgccttgatcttgtcccagctggcgatggatggtgcccactcgagacccagccactgagcaccaaggttgggggcggctcagccttggccccccaccacgctctgcagaaacaggccttggaactggtttctgaaaagtcacttctggtccagaaccttctcctctaaatgggcgccttctttttcaacacgtccatctgtctgtgagtctgggactcctgggcggtctgggcatctgtctcggcctcctctgtcttccccacctcgcggcctctctcggagaatgttccctctgccccgagtgttttcacagcccctcctgacagccctgccaaggtgaatctgtctcttctgctcttgttctgtccttttgatttcctgcctcctgtgtgctcctcatgaagagctgcctcctggtgaggctactccaggcggcccccgcagcacagagctcgtgcaccccagctcccaggcccagccagacgtgctatttgcataatggttaattgattgtggctcaggctaattggtcaacagagtggattgccaataaaccggcaccacgttccaggagtggaatgggactagaggccgtctaaattgcctgccaggaggagatgcggaagccgctgcgctcaccgctgcttggaaccttctttgcacgcaggaagtggaccccccagaaccagcccttgcgtggcctggcctggcctccctgccccggccaccccctcacttctagtcacgacctgctcctcccaggagccccctcccgccctctcccgcgccgccatcctgggggctgccttcacccagcagcaagcctgaataacaaatgaagtcagcttcccaaggatataattttcttgaaagccttcagtatgtaaaacaaggctgattcactttttttttttttttttaaagtcattgggggtgcttttctctggagaggcagatgggtgactcacgttccaaagcccaagctgcccctccctccaccagggaggtggtcggttcccccctgagcagtgccctctccacgtggcctgccttttcccctgagccaggctccctccctgagggcatatcttggggccagggcagccctgtctgagcatctgtggctcaggctggatcgggagacacagtggactggctctgtctcccagacaaggggcttgtggacacaggcgggatccttctctggttgggggagcatcctgggccctgcagggtaatgagcagtatccctggcctccacccactccatgccaggagtgccccaagtcgtgacaaccacagatgtccctagacatcgcccagtcccccgcgtgggaacccctgccctagaccaagggatggcatcagggtgggcgccatgccctcacccccgtgcagtccagccttccctgccctcggcgtggctgtgggatggccctcatgtgtttaccaggtgccccatggggtgcggatggttcggcacagctgcctgagctcagaggacacggcctactccctgctcgccaccttacatgggtctcttccagaactaaatctcgttgagcgagcgttgggggctgtttgtattcttccccctgatggatgggtcgcctaaaactgcagcctggctcctggcgggtgccctcagcctccccactcccggtggcgctgtgcgttctggtgccctgcctgagccggagccctcacagtgctctctggcacccacgcgacgctcctccatgcaaactctttccacgcgagaagcgccatgtgcacgtgctccagcaggtacgcgctccctgcaggacatctgtgcacccgcctcaccacagcctccctggcccactgctgctctgtgagcccggctgggcccaggcctcgtctcccctacccctccgagctcggtgctgcctgtcccctcctgctctgccttggcctgtcgcccctgcgccagtgcaggacaccgccacgcctctggccccgactcctgccagggctgccacggctgccacaccccagctgcattcctgagccctccccaccaacagggacctcagccctcagggacagaacctcacgagcacagggacctgccagcccctgcagggagtgcgcagcctcagggactcacttgctgtctcctgtctctttcctagagctgcccttcattttctcaaaggtgaaattcctcagcacagggtctagtcttgggggtggggagcactgggccactttgggtcgggggtgggcggctctgagggctcagcctggggccagcctcccagtcctccccaccttgtgagaagccctgagccagcgcggcactgaatgctgatggtcccactctgggtgctgcaggtgccctgtgttactgggtgacagggccagaggccgtccaccccgcctcctgccatacaagctgcaaaggacacctgcttccaccttggaaatattagtgcagttatctggactatgtcccgacatttggctcataggaatgagcccagcggcgtccagttaagcctggcaggctaagtgcttatttatctccactctctcctgaaacgccactgaaacaccagagagtgaagtgcagagaacgggagagggggcagtggcagctgagcacgtctccaggctttgaaaagcagggaagggtgggcaggagaccccatgggccggcaaccaggaggacagccagcagggagcagctgggctgcaccatggggccacagaaagacacagtgggcagacatgggcagctcctggagggctgcagggggaatgtaccacggggcctcagaaagacacagcgggcaaacatgggcagcccctgggggtgctggggggatgtgggggcaaccagcagaagacagtgggtggctctgggcagaagggaggcgccttcctggggtcagcagtggggcccagctgccagcctcacatccccccaacccccaaggccaggagagacaatagagggggtgggggtcctctgccagagaacaaaggggcccagtggagcaaagccacatatgctgatactggggctctcctaaagtcacaggctcctgccctcagcagcccctgccactgccttcaccaggcccagctcacacacggcttggcaccgtgcacagagggatcaacggccaggggacccgacacattggaggctgcgctcccatgacaaaggcagggcctgcacagcaaagaagggcagagctccgaggaaagaggatgcagtgagtgcagggccctggagtgggccgggactttgcattatggaaaaagagccattgctgtgaagaagaaacattccaggaacgagtggctctcggatgttaccatctagagaagagacaagcccacagtggattgggaggcccttgaagaatcccctcccacagcactgacagacagagctggaagataggaaggatcaggaagtcagaggcgtagtctaggaaatctagcccctgataggagtttcagaaaaagaaaagtgtcccgggacccaaaggctttgcatttccaggttaaaaagtccaccagaaagtccgcccaagaatggaaattacccaaaccacaatgcatcgctgtgaaatttcacaattcctggattaaacaaaggccctgaaagcttccagagcaaacagatcacataaacagctcaccagactggggctgggcatggtagctcatgcctgtgatcccagcactatgggaggccaaggcaggaggatcacttgaggcccagagttcgaggtcagcctgggcaacatagcaagaccacatctctaaaaaaaaaaaaaaaaaaaaaaaaaaaattataaagaataggagactctgttagcattggatttacagtcataatgccacaagctaaaagacaaaggaaaaaggccttcaaaagtcagaagaggaataattctccccaaatcttttacctagccaaattgtcaagaaatgtgtgaggggaataaggatctttttagacacacagagtctcgtattccacctcctttctcaggaagctgctgcaggatgtgctccagctaaacaaggatgtaaatcgagaaagccatggggttgaggaaacaagatctaacccaggagagtcaaggggagtctcaagatcatgggagaaggaaccaagacccccaggggtgtcatggagagaaggggacaccctgcataggagaccacagcaggagtttaagagcaatggcagggagctcagagataccaaggaagctaggcgtccaaagcaggaggccagttccagaccccagggtgggggcagggaatgcggcccgagttgctctgtggctcatggatgcacaatgtttatggggcataaaagcgtaaacgtggaatttggctgcaatggaagacggtggcaggtgcagggagagaaggggacggtcatggaggcgagcaaggatggccacaccctcaacacctgtgccgggagccagacccagaaacaagcattgggtgcagaaacacgcgaagggggatgaagatgtcagggtcaggaagaggcgtgctcttaggaccccacagatgccccaagtgatggctgcccctctgccgtgggctgtgccccccttgctgtgtctgtgccgcccttgctgtgtctgtgcattgagccctacccagttccatgtagtgtgggacccaggggtctcagcctggcactactgcaggtaggaaagggctgggctgcaaggatgaggccccagagctctggttgggcaccaggacagttctggggccctctggggcagacacagtaaggcttgaaggccgtgggggtgcccctggaaggctgcagcaggggagggccatggtcggaagcgacctctagggtgagttttcagggtgggggtggagggagggactgcagtgggtgggagaaggggctgtggagctgggggcagctgaggccaggtgagcggcatgggagggcgcccttctgctggtgctgtctgggaccagggcgggtccactgtgggatcccggccctacagccctggggcattcccagaccaggagggcagcccaccttgggatgacagtggtgacaagagccagttgcaccccagcgccggtctgaagcttcctcctcctgagcctgctgtctccatctggggcaggcacccagcatttgcctagccccctagtggagcctgaggctgccttcccagagccgtccttgggctgctgttgtggagaacgttctctggagggcaggggccactcccgtgtcccccatccacctcctgctccctgtgttagtgactctggccccacgcccgcccctgcctgcctcccacccctgcccggccaccccgcagcgaccttgtgtgcaccatgctgtgtgatgccatgcctctggtccacccgctttctgccttgagtcattgtggtgggccatgctgcagacatcggggagcactgattctagcgagttaggcagctgaggagcaaggagggccggcagtgactagtgttctaggaaggcttcctggaggaggcgccccagaagccagcatggagcacagggcgggcagagtggctgggagcagcggtgggcaggggtcaggtccaagtgtcccgagggagcatgggctgctgctggcccatgtgacagcctggctcaggcagaggtgaggaggtcctggtaacagaagccccggcagcgggcccaccccacccctgtcagatgagcctgccccaccttggtgaccacttggtccttggaggggcagctgccacagggacccccgtgggattgaggtgtccgagtctgagcccatggggacaggggacacgggaagcacccggaagccgcagccggcattggtgattgtcccggaaacactggcgctcccagctctgcctgactgctggcaggcttgacgtggctggatctcaactggggaaggggagaaaggccactggggagccgggctgtgcggcctcgagctcatggcctagagaggcccctggccaggccagggcttagggcagctgcagggggtgggcctggaggaggtgcagatatcacatgcccaggggaggcactagtgaccagccaggcctcggcttctctgcactcccggcttctgcctgagccccctgggaaccaccccctccgcatctccaaaaagcttttgcttccttcctggaaagaccctggaggtccctgggggaacctggtgtgaggccctggccgctcagctgcagggtcacctggctgtcacttttcctccctttttcagcccctctctctcatttctaagaagtctcagctcagccaagcctgtaagcctcaggttgaatcccttacttggggctggtgtgcagggaccgggacctccccgatgtaccccaggattgtgggtgtccaggttgggcatgcaggatgcgcctcctcttggcccacgcctgccccgtgagcagatcctgggctcagggcgcagaggaggccctggcaggccctggggtgtgggcacaggtcagagcagcggagtgtgagctggggctcccatgcacctcatgggctgcagagagaggacccagggagttggggacagagccaggtggccaggaccaggcgtcctggggagttgagcagaagtcctagagaaaaaacccgtgaaatttacattctagacaaattagtctgaaagaaaacagacactggagaaagactgaggaggagaggaaaccaagtctagaaaggaagaaagagcagaccaaaaggccggggctgtcgtaagtgtctttttcgttccgtttgtcgtctaggcattttccatgagctgctgtttccctcggagctcacactccctgtgtctctgtcccgtggcacacgcggctcctgccgccccgtcccgcccgtcatcccacctggtgtcagtcggcttcccatctccagctgtcatcagcgtcccccgcttgacaccgtccccgccgtgtccattgccccgtctccctttggtctctcctcccaacacggctcctgccccgcaagagcagaaccccacccagggttccctttacccccggcctccagccaggaggccccctgctcatggagcgctcttctgggggtgggcgggggctgcgtgctgccggacagagtgcacagacctagggctcttccctccctggtctcccctcctgcctgataaacctccctctccaggtctcaccggaaacggagccagcccaagaagccgaagcccgaagaccccaagttccctggggagggtacggctggggcagcgctcctagaggaggctgggggcagcgtgaaggaggaggctgggccggaggttgaccccgaggaggaggaggaggagccgcagccactgccacacggccgggaggccgagggcgcagaaggtcagtccctgccgggccaggcctggcaccgctgttttcccacccccgtgggcatctcctagaaggaaccagtgcctgctacagccagagtccccgttttgtaagaatctgattcagtggctttcttgccagggtggggcatttcgtgaaaatagacatcgtaaggtggaggccgtaagaaaagtgcctccgtccccagaattgagaagagcagttacgagaggccaggcgcagtggctcccacctgtaatcctagcactttgggaggccaaggtggcaggatcacttgagtccaggagtttgagaccctgtctctacttatgatataaaaaaaatttaaccaggcttggtggcttgcacctatagtcccagctacttgggaagctgaggtgggaggttgaggccgtagtgagccgtgtttgcacctctgcactccaacctgggcaacagagcaagacccagtatcacaaaaataataataataataaaagaccaggatgctgtatatggcccagatgctggaacgtgcctgcagcagccacagccacttgtgggcagagggctggtcctgactgtgagctggggcccccgtcagcaggtctcccacctgccctcgggcctccccactctcccggggctggcaagacagggggcagccgccttcccacaggagtgtgaaccagcagttgtgaacggggtgcggggggccgggaggcagtctcagaaacattaccttccccagggggaggttttggctgtggaactcccacctgtgagtgtgtaaaggttcctattccagggttgacagcattttgtttctggtgactgggttttatcttctcagtttagagctttagctgcttgggagtctgtgcaaagtggctgttcccagctagggctccccgctgggagcccttccctctcccaccctttccaggtgccatgcagggagcaggtttgtggggtgtgctggccagcctgcctcccaccaagggctgcccccagccacagtgcctgaggcccaggtcatgggggccacattcgccggagggtcctagtcctcagtttccctctgtatgagcccaacatgacctggtctgcctctgaggtgtcaggtctccaggacgcgctggtgcccaaggtgaatattgtccttggaacatggcaagaggcccagctgtggtgccattcagcagatgtgaggtccctcccacctgccaggggcagccgtggggtgcctgatctgtgacgatggggtcgtggccctcgcagtactccaggaggcaggcacgcccctgccctccccatatacatggggcagatattgagggtcacagtttgccagtgcctgtgggcctgaggcaagaaaagtgagcatccctgggggaaagagcagaggccgggggtgagtttgcccctgacggaccacttactcggtggggtacgtgggccctgcgtctgttcagcacgcctcaggagggtctgccggcctagagaggcaagacgaggacagaaaaggcatcgtgggtagaagagaaaagcacagctgtcgtggcactgttattatgtagcgacaattctctactgagaagcagcaagcaagtctacaggcagccgcctggtgactcggggatcgagcggagctgccagagatgagcgacaggcacagaaacccaatctcgcccctcatctgcgagccgctcgcagcaaacatggctcccaaagatgccccttatggtgctagcaaccagaaataatggatcttagaataaacctaaccaaaaaaatgatctttatggagaaaattaagagactttttttggaaataagaaagaattcctaaataaacagaaggacctaccaggtgttaggagagctcttaagcggacaactaacggcttcccccacattctctgcaggttcagtgcagctccatttgggatcccagcagggtttgctgatttaaatgcaggcggatgaaagcccaaggcctgtcaagaggctggggccacccttccagaaggcagggcttgccacagagcttgcaggacccaagcaaagatggcaaaaggtctaggaataggaatcccggagcagtggacttggtgtgagacctcagtcccctccctccccctgtccacgctgcggcctctgtgagtgccctggggccgctgaaatgaaggaccatgaccttggtggcgtaaaacaacacacgctccttgtctcacagctctggaggccaccagtctgacaggcctcactgggctaaaatcaagctgtgggcagggctgcttcctcctggggggctccaggggagaacctgtttcctgcctgtctcagtgtctagaggcgcccacatctcttggctcagagccccttcctcctccttcacagccacagtgcagcctcttccggtctctctctgactcttaccctcctaccttctacccggtgaggaccctgggttcccaggtctcccagatgctctcccatgtcagggtccttcactgagtcccacctgaatattccttctgccacgggaggggacagattcccaggctccagggataaggatgcagatgcctttggggtcattcctctgcctgccacatgcttaggcatttctgtcaaaagagaactggcaaactggaaacacaaagcaggaaagtatataacccaaggctaagtgattgtttattaaaaagcacaaactagaaaaataaagatgaacaaattcagtgactctcaaatccactgctgtttatcaaaggatgaacctttaagaaagtgagaagacaagccgataagtagggaagacactcgccacccgtcaccgaccaagagcagataagaatgcctgaggaccaggaggggctcagccccccaaggaagagggcaccagaagaggagatcccttaggctaatgagcccagcctgctctgggaagcgctgcagacacgctgctgtgtgctcctcggaccaccagaggtggaaacacccaccgtgcccagccctggaagccggtgcagcgggcagcccagtcccctgttgcctgggacctgcgtgagtccggctgcattggagatggacctggccttatccagagaagtggagcatttgcaaactgcacacccagagctgccctcagggcacgtttcctggagagaccccctgctggtggggcactaggactgtgcagatgcagggacaggcaaactaaccaacctccatcgatggagagggacggggaaccagcgcctcctgtcaccctcgtctgccctggaggcatgagcgctggaggccactgctccacgccctgtggctctcggacacgacctcgcgtggcacggggcttctcatatgctgtgctccgtttgtttaaagtccacagatggggcggctgaaatggctgaaatgtacaatctcacacctgtggaagcgggaaggtcacggtccaggtgtcagccgggctggcccattccgaggacccaggaggacctctcccaggcccctttcctgggcttggaggcagcacctttgtgttcccgtgttctcccggagtgtgtctgtccagattccccccttcctaaggacactggccacgctgggcctggcccgccccaagggtctcatcataactcattccgtctgcagtgacgcccttcccaaacaaggtggcaccccaggtccgggggctaggactgcagcaccattcaacagcacagggactcagctctgcagcaggcgaggggcttcctgcagggcaggagcaggcacaggtgcccatttgtgttgtcatcctgcagggcctgtgtctacactgcaggtcctctggggtttgggaaatcctcagaaataatgcagactccagcaggcaagctgggcgcctgagcatgggtcgtgctggtagaggataagttcctgggctggctgcggtagccaggcctcctgttttctgagcaggagtctgtgtttgattctggagacggtgagccccaggcgaggtcggcaggggagtgggggatgggcgcagttcaggttctattccaagggggactgtgggatgtcgctggagggactggcgtgggacagggaggtggctgagccgtgaccattctccccacaggatgggctggcaggggtgggctgggcttgggctggggtccctgggggtggggggctgcgtgggccaccttgagcttggaccttgtgaagctgcccttctcacgagtcagaacgtgctgggggctgtgtgtggtctcacaggagatgggtgagttatgggaaaacaagcaggcagagaaagatccaggcttgggtctggggacccgggcccacccaagcccacccgttaactgcccatgtgaccctgagctgggacaccgccttgatggacccttcaggagggcagagataagaggacacgcatcctccccaggccggcgcggtgggggaaatcgggcaggctgctgccgccgccgctgccacctgtgggttcaggcagcgaggaaagtggcccagtcctgggaaggcttttacagagtggagctggctggtcagagtctgtcctgggttctcagtggggcctcctgggaggggtcacaaggatcccccgtaccatgggtgtcttcctccctcttgagcagactctaggggctggccagcctctggctggaggaagggcggccaccagctcctgtgacttgttttacccaactggctagcaaaggactgtggcttcttttccttttcctttcctttcctgatggagttccgctctgtcacccaggctggagtgcagtgacgcaatctcagctcatgcaacctctacctcccaggttcaaacgattctcctgcgtcagcctcccaagtagctgggattacaggcgcccgccaccatgccctgctaatttttgtatttttagtacagacagggtttcaccatgtcggtcagaatggtctccaactcctgacctcaggtgatccacttgcctcagcctcccaaggtgctgggattacaggcccgagccactatgcccagccttcttttcttttctttttttttgaaaccgagtcttgctgtgtcccccaggttggagggcagtggtgcagtcacggctcactgcagccttggtttcctgggctcaagcagttctcccacctcagcctcctcagtagctgggactgtggacgtgcaccgcaactccgctcatttttcaaaatttttagtagacacggggtctcgctatgttgcccaagctgctcccgaactcctgggctccgcctcagcctcccaaagtgctgggattacaggtatgagccactgtgcccagctttcttttcattaatgtgactaactgttatttactaatcttcccaagcccactgacgagacagccacaccctccccagccccggcgttacctgctctcacttgggcctcaccatggccttggcctccaagagactcaggttcagggaggtcctgaaccagggggtcctggttctcctctggtctcccctccccatgcgtggtcctggctggatgggcggctttcctcccctgacagtggcagttgcccgctggagagaagcctacaccgcgtgggagggaggggaaaccaatggctcgtccagctgcctggcgtaggtgaggccctggcctggtcactcaccatcctgtttaaagatgtacagggcaactcgctccctcccgagatccccgggggtccacacgcccggtgcagtggtcacggtgccaggaggctgggcctggtgcatctctgaggcctgtggcttccacgggtctctgaagggatcagcccccacagaaaggccagggaccagcgaggagggttaggggctacgttggtggcacgtcagggtctctgcccagggagggctcaggactggtgctgcccaccccccgccccccgccctggacacccttatctctgttccacgacagagactcctgggaaggacccaatctggcaggggtgggcgttttcttggacacagccgttttcccgggagcccgaagtcccaggagcctctggacgagaggtttatctcgagagagcctcataaatgcatgttcacagtcaggggcacgacaggaaatgcatgccacagtgctgcgggaaagatttcctaaagcggtttctggtcctccttgaatgccagtttcacgcccctaaaagctatgacgctgaggcacctttcagggcctagcagtggggtgtggggttttgtgttttcatatggaacaagctgggaaggggccagaacctgttgctcacaggggccagggggcatcagcatcggggaggaagcccctcaggaggagaggtgcctggggggcggttgagaggctgcttcccagtggctgctggtgtcccctatcccattcttactggctgcttcaaggtctgggaagagcggccgccctattgcccagcgctaggagggactagcagccccaccagccagccctaaccccagaaccaagcagaaagcaggaaggcggcctcgtccacctctcctgagcctccggggaggccccgcctcctggaagaaggcctgcagtgcaggacacacagggtcagggggcagagccaggatggggacccaggagggctggcatagtgccgtcctgcctcccagagggtggaaaggctgcggtgagtggggcagccagcccccagcccttcccctcccctcgccccggagtgctgctctcaggagaggcctcgtggctggtgactggttttagaacacggaaagcaaaggctgccatgtctggagggcggccccagctcatagtgaggggctgtgagctcagcccggggacccgccagcacatcccagctgggcctctgggaccgtcaggcgcacccggctgcgggttcagcacgggagggtggcagtgttgaagggggtggccagagagcccctgagaccggggctggttggcccaggcatggaagccaagcacgaaacttgagggaggggccccataagccaggccgaagctggtgagttgatctcggcagcctcggagcaggaacagagtggtgtccttggaaatgggtggtttcttgccccctccacagggcagcctgggcctcgggcctgtcttggggtttgctggaggctctggtggaaaccccggcgctggggaggagtggcctcgccaccaggcaggctagtgagccctggtggtggggtttccgctgtgacaccttccctccacccaaaaagagtgctagcagggcctcagctggctgccctcgggggcctgggtgcatcctgggccccatctgtaccatggtccctgctctgtcctgaagcccctcacccgcttccctccctcaggccaggcaggtgaggggcgtgccaaggtccctgtggagtgtagtccccatggcagggacagagccccaaggaatggcccacagcaaggacagagccccgaggaatggctgcggggtgtgccgccgtctttcagggtgtccttcctagccttgggcatctccctctaacagggtcccctgtgtgtctgcccgggcttcactgagcctgggagccgacagggagagggctggaaacttgttcttgtgagtttgagaatccagggcaccagcaggtgcgggctatgcgtggagtgcgttgaggctgccgccattgtcattcactgctgtctccagacaggggatggggtggcactcatcagccgggcacctgaggctcaaattatgtcccactttgtctcccatgcctggtccctccgggagacagaaccaggcagccaaccagggagggctgtggggaagcgggacttggggccatccctgtccttggaggaggagggagagagccctacagtgtggcccttggtgagaggacagcccccgggaggcctaggggacgatggtggcctcagctccccacccagccttgcctcccgagcagaaccagggcctggggcggtcacaccagccgcccctcagctcccaggaggccccgttggtcgggggaggatgccagccccttagagaggcggggactccccagggaccctctgagcaggcacctgtggtctcgtgaggacagcccggctctgtgtctctggccccacagccctggctggagtcccctgtgcacagagctgcctgttgtgtgtgaggacagcccagctctgtgtccctggccccacagccccggctggagtctcctgtgtgcggagctacctgttgtgtgtgaggacagcccggctctgtgtccctggcccccacagccccggctggagtcccctgtgtgcggagctgcctgttgtgtgtgaggggtgggtgggggtgccggctggggactctgatgagtgtttcctcctcgcctccttccccaattcctcatgtgtgcactgagtggccctgcagctggaggccgtgaggctgtgtcctggcatcttcctccctctcctgagaccatcgatgccccaggtggggccctcctgggccagatcccacgccagcccctgcccttgaagttgaacccggcttgggaagccggcccagcagtggggggcctgagtcccagtccccggtgaggctggatgggcaccgcagcctgcagtcctgagtgaggctgggcaggcgctatcatggacgaaggaatattggatttccttaggggaacaaagctgtttgtcctcaagtgccttttacacacgcaggacagtggctttcctgacaggcgctcggggtgaggcgtgcggcctctgcagcctccccgggctgctccagcttccagccctggtgaagcttccggcccctcccctctgcatctccacgcctctgctcccagcctcccagggagggggtgcctcccctctggcatcggcagggaaaaagtatttcttcccacgccagcctgtctgctgtgtccagtgtttacctcccctggccagataacagctgaggggccagataacagtggaggcggggggcgggggggggggtcatataacagcggggggcccggataccagcggaggggaagactgcgctccctgcaaggccagacaggacctgggggtgttccaggctcccctgccggggtggaggtcagggaggagcccggccagtgcccccagtgccccagaatgctcaggactagcaggggtgggggccagggcagtggcgggggctgccttcaccttatggctgctcgcctgtccttcttgagaaacaggtgggcgtgtgcctgccaaggacaccgtgggcggtcccccaagcctgcagatggagctgggtagggtgtggggaggagagctggagcagggagggcagggccgcctccactcctgggggaggctgtgggctgggggccccttgtgggagtgtgtggggcagtgtggcttcctcctggctgcagggtctgttgggggagggtcctcacttgacccttactggggtcagtgtgggtcaagggttaagtgtcaccctcggcccttgggagcctcattgctgagggtctcagcgcttaccactggtcctggcatcacggactgtggagctgggggcagcccgtggtgggttttatagcaagtggtgagatgtgggcgctgtgctccaaaccagaccccgttaagtgccacatggtcaacagtttagtgtgcagaaatgaatttccttctcttaatttttccttatttttccagcctgttgggggaggtggaggtggtgaaatgttagcagtgaccagttcatcctgatctgcttgggaccttccagttttagcactgaaagccccacagcccaagaatcccttggatatcaaccacggttcctccttccagaatgtcccaagagccttagggcctggagacacacaggtgggggcctgagcccctgtccccctcctccagatggagcaggcagggccccagggccccagggctcacggtgttctggggtccacagtgtgctgtgcggccaggctggtcttcctcgaggacagggctccaagttgccgtgccacaacttaccctgagtgcggcggccctcagagggattgccccggcacgagcttcccacagcccgacacagagcgccgctgggctcacatggagctgtgtgcagggacaggccctcctgggcactccaggacagaaacctttcccagcatctagaggcccctgcatccctcagctcgagtcccttcctctcccttcacaggcacagcgcagcctcttccagtctctctctgactctcaccctcccgcctcatcttgtgagggccttgtgaggacatcgggcctcttggatcatctaggatcacctcccatttcactcagtcccacccacagagtcccctctgccagagtcccccatgtccctctgtcatgtcccacatccacatgtccaggagagttgggacccgcacgcttctgggggctgtgattcagccagccaggctgctcatcccagttttattttatttactgcaaacccgtcctggccccaaagtaaaatgccaccaaacacatgagtcaactgtcccctccctgtcacctgtcaggaaatctccccattgctggccccggggagttccacgcggaagggtgtcgggccccacaggcccatctgacgcttcctggttcgctcatgtgaccgccaggttggggttcgttgattaagattttgtgcgttgttcaaggttttactttcgtcaaaagcaaaaccttaacgtttctacatcaacagtagaaatgtacgtaattcggatacacgagaacacaaaaagtgcttctcccccacctccaccgggaaagtgccatttggtacggcccacccaggtgggagcccagaagacagagcagcctcccctggctgggtttggtgacgcgtctcctcacctcccgtgaccccagaaggcacatagagcaacacctggtgggtcctcacaggccttggcaggcaagtgccgctgctgcgcctgcgttgtggggagaccaaggcctgggggtgcctggccaggtgcccctgcggtgatctgaggtggcccgaagcctgtgttctctgcccacccatgttcgtgtggcctctctgggtggaaggagccctcgaccatcccagtcaaagttgggggatttctggggagcgtgggaccagcacttgagcccgggttctcctccctgacctccctctcctcttcccacagaggacgggaggggcaagctgcggccaaccaaggccaagagcgagcggaagaagaagagcttcggcctgctgcccccacagctgccgcccccgcctgctcacttcccctcagaggaggcgctgtggctgccatccccactggagcccccggtgctgggcccaggccctgcagccatggaggagagccccctgccggcaccccttaatgtcgtgccccctgaggtgcccagtgaggagctagaggccaagcctcggcccatcatccccatgctgtacgtggtgccgcggccgggcaaggcagccttcaaccaggagcacgtgtcctgccagcaggcctttgagcactttgcccagaagggtccgacctggaaggaaccagtttcccccatggagctgacggggccagaggacggtgcagccagcagtggggcaggtcgcatggagaccaaagcccgggccggagaggggcaggtggggtggagcgggggaggcagggaggaggggggcaggtggggtggggcaggggaggagggggcaggtggggcacaggggagctggtggcgggggagggggcagggaggaggggacaggagggctgactgctggtttcacagggaactgtggctcttctcacagggtaggtggggtgtctgtacttagagaacagaggagccctgtggttctttgctgggacagtcaccccaggagaggagactcaggcctcaggcacgccgagcccctgtgtggctccgagggagccccacccaggggtctgtagcggggccctcactacagcctgttgtgtgtttcaggcaccgtccacattttccaaattgaagatggagatcaagaagagccggcgccatcccctgggccggccgcccacccggtccccactgtcggtggtgaagcaggaggcctcaagtgacgagggtgagtggggggtccccaggtcggctctcatcggccctgctccgcgctctgctgctgctggagggggggcctggctcccctgcggcttccttcccccacttcctgggtctcctcccctgaacccaggcctttctgtggctctgccgtagcgacaggctgtcactggggcaggtggtcgtgcggggaggcagctgctgttagagatgctcggctctgctctgctggctgggctgcccatgatgggcggttcagggctggggagcttgtacctccccatggaagattcctcccagggctgagcacaggcctctccaggacttggagaggttggaacaaaaggctcccgcgaagctttgagtgggaggggaggagatggaatcttcgatttaaccctcagccgagagctgctgtcttgtgtgcagaagtcctgctaagccagtttttcaacttctgcttcggcctttcattggggatgcatgtagaatctgaaaatggtctggatggcgtctttcatcctgcatgcaattggaggggtggggagaggagggttctagaagcgcgtgggatcacagggcgggagctcccaggagtggaggaatcggcacggggacagaggaatgaccaggggcccccgcgggctggcttgggaaggggtcttgccttctacccaggtatccttccagaaggcatctctggggcctccgtggactcccccactccccacaccccactgtgaccctttggtgagaccggagcatttgcctgtgagaccatcacggccccagaaccccaggcattctggggttgtgagtgacagacgcagccagtggctctgttctcatccccagggcctcggggccgcttagggccttccctgggctccgctggcggtactgtctggtttgggttttcagaggagtcttggcctaagggcttcctgagtccaccatgggagacctgggcctccacctcggggagcctgccctgccctgccctgccctcctctaggtgaaccaggggcagtgccacagctgggctgatcccaggaccccaggctcccctttaggttgggctgaggattgggccacaggagtgggcaccccacttcctggggacagcacccctgtgtccacaggagatgcagggaggggacgtggggagattggggtgcggcagctggcaatggaggccattagagttcaatgggaacaggcaacaggtgggagagagaccgccgcggcttctcagcagcagacctgccttccgggagagtgtccccgtcacgcagctcttcctggggcgggctgccttggcttcctagccctggtcacggcccctcctgactccctgtcgcactcctctggcacctcccttgagttcagtgagtctgtgcccacctaagacaggaaggacagtgtctctgagtctcggctggtcactgccgacgcccccactcagactcagaccccaggacgggtgtagggcagccggggcagggctgggcactgagtttggccagtccttggcccagaaggccctgggtgagtggacggctctggatgtccagggagaaccaggtgttgggggaggggctcagaggaaccatgtttgggggctctggcctcaggtggcagtcagccgagacagacgtgtccccctcctgttgatgggatgggacgctgcagtgtcagcttgatgggcattgtggagaatggggcagccaggaggcaggtggagggggagctatgggccagggaccctgtgggcagccagggctgtagacccggggccatcccctgggcagttggggtgattccttggacgagtttttagggggctcaagtgtctctctccctctcccctctgttcttctagaggcatcccctttctccggggaggaagatgtgagtgacccggacgccttgaggccgctgctgtctctgcagtggaagaacagggcggccagcttccaggccgagaggaagttcaacgcagcggctgcgcgcacggagccctactgcgccatctgcacgctcttctacccctactgccaggtgggcaggcgggcctcacgggtcccagagaaccccaggcaggggcggtgggagagggcgagggaccgggcaccccacacgcctccctctctcacgcagggcagggtgttggccagcaccccgagttgtgagggcttgttcctgacagccgtaggcagagcctggtctctgggttttattggaatgaagcttactaacgtgcccatgtgcaacatgagccatggtggatggggcagagggaggctgcggaggctcggggtcactgccctcagggagcgcccgtgtctggtgggcgctgagatgggccgggtggtgtgggagtgcagtgaaggcccaggtacaccacctgggtggccgggcggggctcccgcaaaccctggcctgtctagctgagctgggcacctggctaaggtcctgtttctggtgctctttccatgctggcctcgcctgtcctctgcacccagatggggagctggcctctgcccacggccatcccaggcatcagcacccagcccagccgttttcctcggatctcttagatccccccttctctcttcccctgggcatgcagcctccccaggacaggacctggccacatgctttgcactcccagctcctagccccatgccaagcatgtccaggcatcagcagagctgccctgggttggggacgtcaccccccaggcctgtgcgccggccgggtctgggtggacagagccagggagagtgctgtgccgagggtggtgagcctgtcttggggctctgctgctgggagctggatttagtgctctggttcctgagacaaacaagacctgacagccgacaccgtctccaggcacttgctgtcctttgtgaggccagagaggctgctgggagccacagggcctggaatgccacttcagacatgcgtcttcctaattccccttgccaggcagagtgtggagactcgttcatcacacaccacccccagcataccccagcgccaggggccacccagcaccaggggccacacaggccagcctgagctctgtgtctggatgcaaccctcatgggaaggtcttcggcgggttggggacagggtcagacagtgtttggggatcctgactttctggaggagtgagaagaggggccgaggtggctctggccatctccccgacctccccctccagagccagggggtgtcgaagcctggggcaggtgccctgagagaggtccgcgccgcccgcccgcctgccccacacatggctctgtcccctgaaggtcgcctctcccctacaggccctacagactgagaaggaggcacccatagcctccctcggaaagggctgcccggccacattaccctccaaaagccgtcagaagacccgaccgctcatccctgagatgtgcttcacctctggcggtgagaacacggagccgctgcctgccaactcctacatcggcgacgacgggaccagccccctgatcgcctgcggcaagtgctgcctgcaggtccatgccagtgagtgccactgtggggcccagaggagctgcgccctccttcagggtgttggtgggggtgccggtgggggctccatcctcccctgcggagggccacaccggcccctctccccaggctgcactttcagggccagggcaggggcctcccccggtgacttcctgcaatttctgactttctcatccttcccgttgtggtcccaccatctagagcagggggaaaggctgtggccatggaagggctggatgaccgcatgccaccctggggcaggacagggcctccaccgcccccagcatccagaagatgccagtgcaggcccaggtgctggcctctggtgccagcctctgcggaggaagcctctgctccaaggggcactgggctcatcccaccctgtccctgacacccagaagctcaccctagggccagagcaagaaatgggccaggcaccccgtctctccgcaggctgtgttccctgagaatggctgtctctgccaagcagcctttgggggcaaacatccctgcccttgaccttggcccaggcagggttcctcctcactggccctctggacagttctgccgagtcttctccaaggcctgggaggcgacaggaggaactcaggcagccgctacgcctgtgatttgtggctgtggttgaaactgatggtcacagtgagattgcagcgtggtcagggcgtctgatttatctctgctctcagggacccctccccagtcctgaggctcgaccatggtcacagacaagaaaatggatgtctgtctctttcccacgcacgggggggcggtggcaggaattggactttcagggaaggaggagggctctctggagacgtttaattttctgtgcccctggcagccatagatctgtgtcggtttcctcctggcggtggcctgcctgggggctcgcgttgtctcctggctgggaggctcttcactctgctttgctgggcctgggtttgagatgtgcccccggggcagatgggctccctgggggaagggttgccgagggtcccaggcctgccacagccgggccgccccagccaggctaccccagcagacgcccccacccccagccgtgcccaccaccctgctgctctggaggcagtgaggtccccgcccccagcctcttcagtgggccatcagcactggcagagagccccttccacactgggggcagtgatccccagcagaggcagagccctggggggcaggcggcacccctgccctcgctctgggggcatgattcggccttttgtgccctttccccatttccagacccagggccacatcccacagtgagtctcccttgcggctttggcctttctggacatagcaggaggagctgctgttgggggtgcagacacccaacaaggaggggccctcaagacaccaccaggctgagcgcggcagacccagctggagctcagggtccctgcttcccctcctgcgtcctctttccacacaagtagcttccagacctttctctcgctccacatgcagtggcctggattgaagctcagagggtgggaacagcacgcaccctgaatgctgcagctgcgtgcggaggcctcgtcactccacatacggacactggcccccaagttacccggcccctccccctgagtttcactcggctccccaagtctcacctgccccccagatctcagccagcccccgctgtcttccaggttgctatggcatccgtcccgagctggtcaatgaaggctggacgtgttcccggtgcgcggcccacgcctggactgcggtaactcgctccccgcagcgggggtggtgctctgagaggcctgggccccggccccactccagtggggtgactttggggcgtagtctcccctccgtgggcctgggttccttcacctctgccctgagggggtggaacccaagggattcccacccgtcactttggtggctgctaggttgaaatataagggccgtgggctggggacggttggcagatcaggccccaagcagtgtgtggggagcctgctccgagccctgctcatccagggctgtctggtctccacaggagtgctgcctgtgcaacctgcgaggaggtgcgctgcagatgaccaccgataggaggtgggtggcaccgcgcgttggggctggagggccggaggggagcctgccctgggctgaggctctgcagggtgtgaccccagtgcctaggggttgaccatcacctccacataaccgccctgtgtcatggatggggtggccagggctgaggaggagcatacgcctgcaccgaccttcctgaagttccccaggccctgacccagccgacagccacatcacgcccagcccctctgtgaccagcccaggtcctcagaggcgcacctgaccccgctgcacctgccctcccaggtggatccacgtgatctgtgccatcgcagtccccgaggcgcgcttcctgaacgtgattgagcgccaccctgtggacatcagcgccatccccgagcagcggtggaagctggtaggtccttgcggtcgaggcccaccctgcccgtgcctctagggctgccggccatgctcggctccccacctgcgcgatctgaagcggtctttcctccaagctctgcgtctccatgggggtggtgggcagctttcaggaagccagtgatcccgacttcagcaggtgtgttattttttgaatccttccccgaggtgcaaggtacaaaaatcagaaggcatcaagggtggcagagataagcaggccccgtcaggtgtggccttgggggcatcctctgcagaatcgagcaccccatgcagtttccaccttcccacaaaagcagaggcaccgcacgtgccccgacacaaccgggctgtctgatctttgctgtttttctaataattataacaagcctgggcaacacgatgagaccccatctctataaaaaaaataaaaaacactagctgggcgtggtggcacacacctgtggtcccagctactcgggaggctgaggtgggaggatcgcctgagcccgggatacccaggctgcagtgagctgtgatggcaccattacactgcagcctagacaacagagccaggcactgtctcaaaaaaaaacaaacaattgtaacaatgcttagcgtgagatctgccctcttaagaagcatctgaggttcagtacagcattcaccacgggcccagtggtgggcagcagggctctgcggcccgctcacccgtcctgtataactgacacttcacacgtgctaagcagcagctccctccgcccaccccagcacccagcactctgcttctgtgtgtttgcctgtgttatagaccccacgtgagtgggattgtacagtctttattcttctgcgaccggcttctttcttaagagacagggtctctcactctgttacccaggctggagtgcagtggtgtgatcacagctctctgcagcctcaaactcctgggctcaagcgatcatcccgcctcagcctcctgagtagctgggaccacaagcacgtgccaaaaagttaggttaactcccaatttttttttaaaagatggggtctcactatgttgcccaggctggtttggaactcctggccttgagatcttcctgccttggcctcctgggtagctgggattacaggcgcgagtggtgtctttcatttggcatagtttcctcaaggttcatccacattcattcaacccaaatatggcaggagttccttcttttcctggctcagtgatgtgccaccatgtggatggacgacgttgtgttgatccgggcacccgccgatgtctctgccttcaggctgttgtgggttgcgccgcagcggatgtgggagtgtggttgtggtttggagattctgatgtcatttcctgtggatacagacccagcagtgggcttgctggaccgtcgggcagctctgtttttagcactggaggaaactgctctcccttgcggctggacggactcccatccgcaccccccgggtgcagggctttccccttcccctcgtcctcactcacacctacctttgacttttttgtagcagccgccctagcaggtgcgaggtggtctcgctatggtttgatttgtgttctcctggcggtcagtgacgctgggcatctttgcacagtcctgttggccatctgcatgccgtctttggagaaacgtctgttctgctccttcgcccattccgtgcctgggttgcttggccttttgtggttgagttggaggatctctgctgctccactcttggtgcacattgaggccccccgtagatgcgcgcagccaccttgggcgtagcggggcctcatcgtgggggcttgtgaagcttcctcctgctctcagcaatgatggcccccctttggggaaccccttggagccacagggcagtcaggagtggtcagtgctggccaccagctggctgtgcacttgggacagattcctcgacctctctgtgcctcggccgtcccttctgtgctgtggggttgccacagtccccgccatgcagggttgcagtggtgtgagctgggcccactccctaaagcatggaccaccctgtctgagcactagcagctgctcagggcttgtcaaatctgcagcctcgctcccccaggcccccagtgtcacctactgcatttgatccacacagtgagagcctgtggggtcatcctgcactgtctgttctgcaggtgaggagcctggggcctggaggggcttggccgatcatggcctgggctgcagccctgcagggctgtctgctgcacaccctgtagcccacctgcgcacaaggcacttggggctgtccacgcctgctggaaaatgacactcagctggccctttaaatcagcttcctgcagagccttgggacctggcccagaaagaagatgaggaggccaggcctggtggctcatgcctgtaatcccagcactttgggaggccgaggcgggtcgatctcctgaggtcaggagttcgagaccagcctggccaacatatgaaaccccgtctctactgaaaatgcaaaacttagctctgcatggcgggacgtgcctgtgatcccagctactcgggagactaaggcgggagaattgcttgaacctgggcggcggaggttgcagtgagctgagattgcgccactgcactccagcctgggcgacagagtaagactctgtctcaaaaaaaaaaagatgaggagagcaaaatgcagatgttgctggggccgcgtccccactaagggctgtgcatgtggcagcgctgatggggaggacgcatttgtccctgtgcactccggcctctgcacacgtgtctcgtgggcccctggaggctgggcccgcagccagtagcacccagcagcgtcctgcctgcttttcctgcctggtttatcttcccagccgcggacacagtgcctggtgttgacattcaggcttgcgtggaggtggggctggaagcagacagatcagtctggcagggtgggtctgctggggagaccacaagggtgggactgatgccggccacaaagcccgggctcccatgcactggtgcgaggtgcccacgagcccggcgggcttggatgccatgcttggagcccacaggtgctgggccacctgggcagggctgtgcaggcagtcacagaggctcatctggaaggggagccctctttccttgttcgtggagtggagtgtgcagtgggtcacgccggcctggccgggcacggccaggcgattaggaagccggcagcccgcgggtgatgcttccgaggcaccagtgactcagtccacaaacgtgggcgtaaaaggcctcatgattcaggtggagtgatggtgcgatgcgtggtgcagtgataagtcctcctgcccgacgccttatggatcatctgacatttccagaacgcagcctcttcattaccggtgcttgtaacgatgaattaaaaatccttttacacgaggcccgcttgtactgcttaatggggctttgcaaggaggcggcggttaattcctgctcgcccaaccgcccagccaccttcgcgggccacgggcaggctgcaggcatggggcactcactcctggttacccatccgtcagtttgtctccaggacttctccagccaccggctcagggctccaggcagtcctggtgagtcagggggctccggctggccgcccgcctgggccaagttatcaccacgttctcaaggccgtgctgctgagaagcttctcacctaccggctgggcaggttcctggcagcaggcaaaagcaccgggagctccctggaggatctgggaggtctgggaggggcttgggatggggggaggcgcctccagggcagcaggaggggtgggcagttgcaccagctctctccactgcccacagtcctgcctggaggggtagggctcggtcaggagggaggggctctctgctcctcaggggttggggttgtttgcgaaagcaggttggtggacagccactgcgcctcagtgtgtgacaggctgaggacacagcttcatgggtggtacctagcggtgaccacctgcttcctccaggccgtggtgctctgcagacctctgaagcccacccgcgtcgtcctcacagccctgtggcctccgaggaaggacaccgagccgggaacttcgaaccaaacaccagtgcctgggcccttccaggccccccacgggccgtagaccctgactccccggcacacactggcctgggccaggccagcactggatgtgggtcttcaaactgcggctcccaggaagggaggtgacggccaagaacgcctgcccgacctcctgtggccacagcgcgtggcgtgactggacctcgccttagtaggggtggctctgggcaacctcggccccaggcacagctcctgacaaatggtcccatgggtccgggggcacgcttttcacaacgtggagatgcagggtcatgggctgcctgctaccacgaggcggaaggggatggtgctgggcaccagcctgccccggggctgggtttctcctgggcctgggccgaggggtggaggcctgtgggtgacgtgttcaagacggctcagcaaccccacctgacagtgtccaggtggggcctctcccccacccccaggctccccagggagcacagcctccactcctacacactggctactctgccggagggggaggccgtgctggagtgatgcctggcgcgtgttgtgtgatgggagaattgggtatttacagtttaataacgagatctcgatgccgtcgatcggccctgctccaggcccttggcttatctggcttttgaacgtggtttatagagtggtgacggtgccgcttattaaatgcttagctgggcctggcgtgggtgtggcggccgccagggccccggtgctggctcgggcaggtgttgcagcgggagcctcaagggatgaaaggtggctctccggtgctccctcctcaccaaggaggcttctctcagggcttcttattaaaagccgatgtaaaggacctgcgcgatggctcacgcctgtaatcccagcactttaggaggtcaaggcgggaggatcccttgagctcaggagtttgagagcagcctggacaatatagcaagactccacctctacaaaagtcaaaaattagccaggcatgatggttgcacctgtggtcccagctactcaggaggctgaggtgggaggattgcttgagcccaggagttggagaccgcagtgagctatgatcgcgccgtgtgctccagcctgggtgacagagcacccaggctcaaaaaaaaaaagaaaaaatccttcactctaaccattctaaagtgtgccactctatgttttttagtacattctgagttgtgccaactatcacaccgtctaattccagaacagttcatcaccccatgaagaatgggccccattaccagtcgctcccatcccctaccctgtgcccacgagcccacttcctgtgtctgggggtggcctgccctgggggttgcagaacacggggtcacatggtctgcactcacctctgtgtccccagggcacatctctgtcgccacgtggttcctctggctgagcgacaccacgtggggctcttcagtgtctgtcccagcagtcagtgacacgcagggggacgggagaggactccccgggggctgatctgtcccagcagccagtgacatgcaggggggatgggagaggactccccagaggctgagcagcaggaggctgggtcagtgggtctggagggcttggccagggaggctgcgggctctgggctgtggaggggaaccctcactgggcagagcgcagggccactcccgcgatgcctcccttgaaggctgtgccgggaggggccggggactccgttccagggtccctagggaagctcgagccccatgcccctgcctgtgtccccatccccagaaatgcgtgtactgccggaagcggatgaagaaggtgtcaggtgcctgtatccagtgctcctacgagcactgctccacgtccttccacgtgacctgcgcccacgccgcaggcgtgctcatggagccggacgactggccctatgtggtctccatcacctgcctcaagcacaagtcggggggtcacgctgtgagtgcctgcccgcctccttgcccccagcccctggctcccgcccccaccgacacccgcgctgaccgccccccacaccctccgcaccctcccaggtccaactcctgagggccgtgtccctaggccaggtggtcatcaccaagaaccgcaacgggctgtactaccgctgtcgcgtcatcggtgccgcctcgcagacctgctacgaagtgaacttcgacgatggctcctacagcgacaacctgtaccctgagagcatcacggtgagctgtggggtggggcagggggcggggggaggctgggagcacagcgacaacctgtaccctgagagcatcacggtgagctgtgggggtgggcggggggaagctaggagtggcctgactccagatcccttcatggggtccccttgtcctcagggccccaggccccttcaggaaaagcaccgctcactgttcagcagaaagcgacccgcagccagggctctgcaccgccccgctaccccgggcccccgcagccagctttggggcttcaggcagagaacctcacttgccagcgcggagagggtctaaaacccagcgacagcccccagcgtagtgtggccaggacctcacctcccacctcttctccctgcagagtagggactgtgtccagctgggacccccttccgagggggagctggtggagctccggtggactgacggcaacctctacaaggccaagttcatctcctccgtcaccagccacatctaccaggtaagcgggggatctggcagccgcgccatgccttcaccaagctcttcttgtaggtgcggggacaggaggatcacacccctggcccaggtgcctttgcctggggcactggcgggtgtgggccatggttagtgaggcccgcaggacccagctgagccttggctcgcctgcctaagttagaagcacagggcttgtttgttttcaaagctaaaggggcctccactcgggtgacatttccctttgagacaccttctcaatttttcttaacataagttctccctttcaccgttttggagtgtacagctcagtacccctgggtttttttttttttaatcaaattggtagtgagtttcttctcatgactgtggaagaggaattatttaaaagtgtggaatcttagaccgggcacggtggctcacccctgtaatcccaacattttgggaggccgaggcaggtggatcacttgaggtcaggagttcaagaccagcctggccaacatggtgaaaccctgtctctactaaaaatacaaaaattagctgggcttagtgacaggcacctgtagtcccagctgctcgggaggctgaggcaggagaatcgcttgaacccgggaggcagagtttgcagtgagccgagatcacaccactgcactccacactccagcctgggtgacagagcgagactcagcctcaaaaaattaattaattaattaaatgaaataaaagcgtggaattttaggaggagagctgcccatatcccagcagctagaagcgtcgctcccaagcctggtgccgcacttcccttgagctcccctggctcgaggctcccgggaggaggcgacagcttgtctcttccagtcacatctgccccatttgaggagtggaaacgaagcctcactcagagtcacctcgggtcacgcggcgggtcagtcggtgacgtcctggccttagctcgcaccccgagccccaagttctttgtaaacatcggagttcagctctttaccacgtcggttaaggtgaaaaccctaacccctgcgatggtcccgaggccgcattaaggaaaggtcccgcccgcatctcccgccagacctgaatgaactgaaatgatcgagtgtcactgagtgcccaggaccacccctaccccccgccgtgcaggccggccccgcccggtcaccactctcggacctgtcactgagcatccaggacccccacccccggccgtgcaggccgaccccgcccagtcaccactctcaacctgtcactgagcatccaggaccgccttgccatgcaggccggccccgcccggtcactgctctcggacctgtcactgagcatccaggaccccccccgctccgccgtgcaggccggccccgcccagtcaccactctcgacctgtcactgagcatccaggacctccttgccatgcaggctggccccacccggtcaccactctcggaccttgcagggtcttccctgctccttgagaagggggtggtttcggggacaagccatccccatggccagccctgtgggagctaccaccaatctccagacactgtcacttctgctcagctccagccttccctggggggaggctcaggcagctccttggacttcctgattgtgttaggcttagaccaagggcaaggtcgatttgcaccccttagcccatcccaggcagcagcaaaagagaataatccctgctcagctcacctggcagctcttctctcaggttatgagtttcaggtgggctgggcgcggtggttcacacctgtaatcccagcactttgggaggccgaggcaggaggatcacttgaggctaagagttcgagaccagcctgggcaacaaagtgagaccccccccccccccacaatctctacaaaaaattttaaaaattagctgggcatggtagtgtgcgcgtgtagtctcagctactcgggatgctgaggtgggaggatcgcttgaacccaggaggtcgaggatgcagtgagctgtaattgagccactgtactccagcttgggtgacactgagaccctgtctccaaaaaaaaaaaaaaaaaaaaaaacaaaaactctgctgggaagcattctggtgcatctagtacacggcaggatgggtggggtctgtgtgacagtgacaacaccctccgcctgccccgggagcctcagagtctggcccaggcaggtcggactggactccgaggaggggaggttgagccaggacctctagaacaccatggaagtttactccagagatcaggctgagcatgtgccagtctctctccctccctcaagaaacctatggagatgatagaaaacacacaaatagataaatagccatttataacgtacacagagcacaactgtggtggaaaatgacaagggagactcagggtgggtcttgacaacatcccacagaagaggcgctgacgcagcccccaccctggtggcgaaggaagtgctcccaggatcattgtcatgtcaccagagcccaggcagggccagcgtcaggggagctcacctcaaggaagccgagctaatgagacagtcagaaatgagatgatgccagccaggcgcgggggctcatgctgtgatcgcagcactgtgggaggctgaggtgggcagagcgcttgagcacaggggttcgagaccagcctgggcaacgcagcaaaaccctgtctctacaaaaaaacaaaattagctgggcatggtggcacgcacctttagtcccagctacttgggaagctgaggtgggaggatcacttgagcctgggaggttgaggattcagtgatccaagatcgcgccactgcactccaacccgggtgatgaaacaaagccctgtctcaaaaaaaaaaaaaaaaaaaagtcacatttccagagtgctcggggcgggggggcagaggctgtggaatcaggaatgggtggtatcggaagccagcaagccaccgtggagtgcgcgcctgcctgcgaggtggcggcaggacctcgatcacacaatcatgcaaacgcccgctgtgtggtggccaaggagatggggctggagctgcctgccccgaggccaagggcctggtcagcggggcgggtggctggggtgggcccaggtgacagcgaggccgagtggctgagacccccacatgccaaggccccaagagcctccccgcctgtccggaacacttggaacatgtttccctcgcacgtgacccctcgagatgcttctgagacgtgccgggcaagacgtcaccacagggagcccgggccgaggcgcacgcctctgatttcctgtagctgcaagtatatccagttttctcaaaatgttaaaaagcaaacgccgccttcagaactcgccctgtggagactcatagtgaaagcacgttccagggaggccactgggaggaaatcagcctgagtctccagtcagcccccagttcccaaatgacccaggcacagaagtttccctggagcccacttggacccggcagtgtgagcgccatcctcctaggcggttctgtgctcctgagaatctggggcggatctctgcagtcttcctgacccagaaacctgagccagtttccactgagtttctagaacgcgccttcccctcctggcaaggctgcttctgtgcctgactgaatcactgtgtgccacgcctgccagaagccgagaggccgagtcggggccggggagctggggaaaggcagcaggtgggccctgggactcctgcagtgggagctctaaaacccgctgctgcccgtggcaaagcggagcctccaaaacccgctgctgcccttggcaaagcggagcctccaaaacccgctgctgcccgtggcaaagcggagcctggccacgccgggggtggaaatcgctttccggggtgctggggctccgacactaggactccttcacccagactctcctcaccggacagacgctgggaaggggccttctcccggtggctttcctctacaaatgagatgggtaggacggggcagagggtggcacccatgtccttggttcccagcaggctcctccacacatccccgagagatgtgtgctgtcgtcccaggacacggcccagaggcaaccggccatctgagagtccacactgggcactcccagccctgcttctcccgccgcctgcgccggccaagaggcatgtggaacccacagcagacacttgctccagggcctacgtctgtctccatccccacccatccctggaggagtcacagggaccggcaggcttggctgccccaaggcagggtctgtgctcccttggagagggaggtgctgcgatcccgggcccccccgctgcacactacgtggggcgtctagccccagacacacttccgcgatggtcttactgtgtgacttttatacacttccgtcatggtcttagtgtgtgacttttgtacgcttctgtgacagtcttatgtgtgcattttgttcattttgagacggggtcttgatctgtcacccagcctggagtgcagtgacataattagagctcactacagcctccacctcagcctcctgggtagctgggaccacaggcacatgccaccatgcctggcttgttttgagtttttaaatgtgaaaagcgagccctctgatatgggaaccttctccccctggagcagaacggcagtcaggcccagggagtgaccccagcacctttcctggcttgggaacacggcgcccatcgcagttatgaggtgggcctggagacacgcccctccctggcacgcccttcatgggacagtgttgtgttgccagagggcccctgagagagtctccgcgagcctgagctggcaccaagcttaacgaggaggaagcggggtgctcccagtgcccctcaccagtcaggcatctgccacctggaacaaggcaccagctggggaggctggaagggggtgatttttctctgagttgaagggaagaggtgactgagctgttttcagagggccacacataagccagggaccctgtccttcaccttctggttgggggctcctgagctcaggcccctgagtccgcctgtccggcctcccctgcctcccaggccctgttagggcactgcgcctcctgcctggctctgtgtccaccagtgactctgtcaccttgtcctggggctgtgtcttcatggagacagatgtcttttgagctgggaggaggtgaggggtgagtgttctgtctccatgtggaagctgcggggccctgcctctgccccaggctgtcccgtcctccgtcatccttgccccgtggtacgggaccctcagcctgatccttgtttgctgcaggcggtgtcagaggtggacatgagcttcagcttggctgcatgtggcctctagcgggccccatgcacccaagggggctggcctcccagctcttgaggccgtggcctgcctggagcacctgccatcctggcagtgccaggcccctgagagccacatccccctgcaggtggagtttgaggacgggtcccagctgacggtgaagcgtggggacatcttcaccctggaggaggagctgcccaagagggtccgctctcggctggtgagtgcgcgaggctggcctggtggctccgggtgactcagggagcccgtctgggacgaggcagggcacagactgcgtcttccaatggcgtggaccaccccctcctcttgcacctctgctggaagggggtcccggccgccccagcacagctggtccatgggctcctggcaggagacccttcctttgccttgactcctggtgccgcagctcctgggcgatgccgttaatgtggggagggagggttggagaagccccgcccctccccttatcacgaatgcagaacagaccctcccagccccctgtgccctgcaggacccgcgctgccccaccctgcacagggcggcctctgaaccatcacaggttttggggtacaggcgaagtacgggcaccccagttgtcggcttaaaaaagcttttcctgaggtttttccttattaaacgggagcctgagtcctggaggcagcggaggcagctccagctttcgctcccccagccctcatgggcttcctttattctctttctaatcgagaggcgagaggcgaggtgttgaggggcagagcccgtgggggaggttcctggtcctggccacagctgctcagccgcagaggggtccctcggaaaacagatgggagctgccagatggacggtcccagccccagccagggtgcccaccccactagggggccagaggctggggccgagtgcagggcccctctgctggcaggatcaggggtttacaaacacgaaaacaggagcctgctgagcagcccccacagcaatcagggctctgtgtccagccagctcctctcagaggccatagacagtggctggggccgcacagagtgtctccaccgtgctaaccactgtgcttccgctctcccgcagtcactgagcacgggggcaccgcaggagcccgccttctcgggggaggaggccaaggccgccaagcgcccgcgtgtgggcaccccgcttgccacggaggactccgggcggagccaggactacgtggccttcgtggagagcctcctgcaggtgcagggccggcccggagcccccttctaggacagctggccgctcaggcgaccctcagcccggcggggaggccatggcatgccccgggcgttcgcttgctgtgaattcctgtcctcgtgtccccgacccccgagaggccacctccaagccgcgggtgccccctagggcgacaggagccagcgggacgccgcacgcggccccagactcagggagcagggccaggcgggctcgggggccggccaggggagcaccccactcaactactcagaattttaaaccatgtaagctctcttcttctcgaaaaggtgctactgcaatgccctactgagcaacctttgagattgtcacttctgtacataaaccacctttgtgaggctctttctataaatacatattgtttaaaaaaaagcaagaaaaaaaggaaaacaaaggaaaatatccccaaagttgttttctagatttgtggctttaagaaaaacaaaacaaaacaaacacattgtttttctcagaaccaggattctctgagaggtcagagcatctcgctgtttttttgttgttgttttaaaatattatgatttggctacagaccaggcagggaaagagacccggtaattggagggtgagcctcggggggggggcaggacgccccggtttcggcacagcccggtcactcacggcctcgctctcgcctcaccccggctcctgggctttgatggtctggtgccagtgcctgtgcccactctgtgcctgctgggaggaggcccaggctctctggtggccgcccctgtgcacctggccaggggaagcccgggggtctggggcctccctccgtctgcgcccacctttgcagaataaactctctcctggggtttgtctatctttgtttctctcacctgagagaaacgcaggtgttccagaggcttccttgcagacaaagcacccctgcacctcctatggctcaggatgagggaggcccccaggcccttctggttggtagtgagtgtggacagcttcccagctcttcgggtacaaccctgagcaggtcgggggacacagggccgaggcaggccttcggggcccctttcgcctgcttccgggcagggacgaggcctggtgtcctcgctccacccacccacgctgctgtcacctgaggggaatctgcttcttaggagtgggttgagctgatagagaaaaaacggccttcagcccaggctgggaagcgccttctccaggtgcctctccctcaccagctctgcacccctctggggagccttccccaccttagctgtctcctgccccagggagggatggaggagataatttgcttatattaaaaacaaaaaatggctgaggcaggagtttgggaccagcctgggctatatagcaagaccccatcactacaaattttttacaaattagctaggtgtggtggtgcgcacctgtggtcccagctactcgggaggctgtggtgggaggattgcttgagtccaggaggttgaggctgcagtcagctcagattgcaccactgcactccagcctgggcaacagagcgagaccctgtctccaaaaaaaaaaaaaagcaatgtttatattataaaagagtgtcctaacagtccccgggctagagaggactaaggaaaacagagagagtgttacgcaggagcaagcctttcatttccttggtgggggaggggggcggttgccctggagagggccggggtcggggaggttggggggtgtcagccaaaacgtggaggtgtccctctgcacgcagccctcgcccggcgtggcgctgacactgtattcttatgttgtttgaaaatgctatttatattgtaaagaagcgggcgggtgcccctgctgcccttgtcccttgggggtcacacccatcccctggtgggctcctgggcggcctgcgcagatgggccacagaagggcaggccggagctgcacactctccccacgaaggtatctctgtgtcttactctgtgcaaagacgcggcaaaacccagtgccctggtttttccccacccgagatgaaggatacgctgtattttttgcctaatgtccctgcctctaggttcataatgaattaaaggttcatgaacgctgcgaaaccccgttccatgccccggcaagtgtcttcatttctgagcctgtgctagggggactgatgttggggcctccctggggtggggctgcctgcgccccgttctcccgggagaaggtttgcttccagagctggatgtccctcccctcccactctccagggtccccaacacacccccacacacccaggggcagctgtcatgcccctcatgctgtggccaggctgggtggctggggcagcggaccccatgattccccctcagttctctggaggcctggccctggcctcactcgtcccagccagcagctgccctgtccctgtcccccatccggttctggttacatctgagccccgagagcattgcttgtggtggtggtggctggcagacgtgctaggcgctggggctcacggccctggatggccactgggacccagcagtcctggcctgggtcactcagtgcccagccccaccaggcctggagtcggcagaggggacacgggagacctgagcctccctcagggaggtgaccctcctgtgcctggtgtgcggcaagaacatgaagaggcccctgtggctggagcagagggaggcaggggagagggggaggaggggaggcagggtgtgcaggcccttgtgggtctcgggaaggacttgggctttgaccctgagggaggtgggagccatggaggggtgtgggcaggggagggatgggccctgactcaggtgctcacaggcgccctctggtgattgctgtggggaggagacggggtaagggcagaagctagggaccagggcaggggtcaggtgtagtgagaagtgggtggattctggatgcattttcagtgcagagccaataggattcgcagatcacccgagcccctggaaggaggcgttgagctgggagggggttggatttgaacaccagacgtccaggtgaaggtgctgggtctggggaggccgccccaaggcaggtggtcaggggccgtcagctggcaggtgttggaactagaggatgaagtcacctgcagggagtgggtggaggtggggtgggacccaggactgggccctgggtgtctgtggtgggacgggggctgggacacccggagaaacccaggcccagcagccagggctcggggggacgcggccaggccatccctccctgggccccggcgttccctctgcagaaggagtgtccacctgcctgctgtgccgagggcttgtgtcctgaacagagggtgcccttgacaaaaaagcttcatccacctactgcccccagcaccgactctcctttctggggccctctcgcctccagcatcctctcaacaccaccaggactcagttcccctgtgtgctgcaggtggggaggagggatccagggtggggtgaagcccgtggccacaggaggcttggatgctccacctgctgcgatttcccgacaaagactgtgtccctcttttctccatctcgaaagccttccctgtgtgcggggacagacacagcctgaa

SEQ ID NO: 302 - DNA, 36059 bp, Homo sapiens
  source 1..36059: mol_type = genomic DNA
aaactgaggcccagcatggacactgggtggtctgccccagggcccccaggtgggagagtgtcaatgatgtcccaggttcaccacagctgagcccctggggacatgcagggggctaaggcaggttagggagatcccactgcactctagtaatcctgcaatgttatggtgagtgctatctacagtgcgccggggctgactgggctgggtggcccagacaaatgggcccctgccctcgtggagaccaggaccaagagaaagccgtgtgaccagagtcagattgggtgattctggccaccccactggtatggacatcacaaggcccttctggggactgacggaggaggttcaagggtgctgaacccacagctggtccccagcgcaatttctagtccttagggtttgaagccttggaccagcctgagacaaaacccagatgaccatcttggctcctctcccgctgaccacctctgtccccttctggcctccatttccgttgtcgtgggatcagatgatataaaagggcttggtcagctgtaatagacccagaggcctgtaggcaatgagtacagcaatttcaggattcttaatgtttcctttcctaccagcctcccagtcacacctctcacctgcccagagttcaaccctaattagtgttgagcatctcagtgggaactcctggtccaggcaggagtgccctggggcctcaaatcctagtccaagggtaaacggaggaagggctatcctcatcttgccaccaaagggtgaggcaggaacacagtggacctgggcccccgctgcacaccgaagatggttggagcctggaaggtgtggtaaagagcgaggaggcgaccccagtcagcagatgggagggaaatgcccactgcgggtcacaggtcttggacgtgtctgaagcctctattcctggcgcaagcgccccaacactgtcggggcttggaaggaattctccaaattcccttattccaggaaaaaatattccagaatcccctgtctattcccagcccaaacttgggataccaagtctcctggggtccaaccccagcctctcgctcctcctttcctgcgcccttcccctttccgtccccaccccataccaccctcttccgaacagatctcccgcggtgccccctgcgggacggaacctcagtgccgccccctcccgggcggccccacgacccgccctctcgggccccagcggggggcacgaccccgggctcccgggaccccctcctctcgggactggacctcgccctccgccgggaccgggggaggcggggaggggccgcaggcagcggcgctcccgccctgcggccgctcccgccccgctccttccctccccgccggcctgcgccccgcccgccgctcggccggcccctcccgcgccgctcccgccgtccgctctccgcgcccgctcggcctccgccgcccaaacttttctccgggcgcgcgtccccggcggccgcccccggcatgggcaccgcgccgcagggggcctgacccgccgcccgctccgcccccgcctgccatggcggcccgcgcgccccccgccgcacctgcggccgaggagccggggaacccgggcggccccccgcgcaggaagaagtcccgctccggcgcgtccggcctccgccgcgccttcagctggctgcggggcaagcggcgcaagaagaaggcggcgggggccgagggcgccgaaccggccgccccccgggccaagaaggcggaggacaaggccaagagggccaagggcaaaggccgaggtaaggcggtcggcacctgggctgagcgcgggggggcgtcgagggtgcggccgagggggctctgccgggggtccgcgcgcggcgtgttggaggggggtgacccccaggagctggtgctggaaagcgaagaggccagggctgagtccgaacacttccaccctgcgctgccttccgcagtttccagacccagtcctgccccgctgtgaggggaggggacccccggctggggcagggatcccctggcagagcaggaagtgctggtagcccgactccagggcggtgaggcgattccccctcccccaggctcaccgaggttctgccctctgctgagtcagggggtcagagacttaacgctggcctgtggccaatgggagagacaggtggccttgggtctctggtggggaccctctgggtctggaaggtcaaccgcactcacaaagagtttcagctccagctggatctggatttccagccccacaaaggacctcacatggagcacagtgtgccctgccttagcttcttaacagtgctggcttttcccacctggcctccctcaacgctcacctgggccaggccacaaacatcacctcctggggtagtgagctcaccaaggtgaaccaacccgcccctccctatcactccttcttccagccctggagaaacatgccagtgtcggaagtgtgcttacagatgggggaaactgaggcccaagctcagtggagaggctgtacctgggctggggtgggtacttaaaattcaacagctaattctcagtctttctgaatttgagtccctgggctcctcctctggcctggacgggcagcctgaaaggcggggaagccgacctggcccatccctgctggggtcattttcagttcctttcttgggccttccctcattttccagtttctgtcttccttttgatggggagggcttgagtctttgcaagagggtggagctcccttggggcttgctgtcctgggaagtccacctttcctagactgctgctgcagtgctggaggtgaggaaatggctgggtgtgcgggcccatcccattctgcctgtgtttaccctcccagtgtcctttaaccacctcttctgggagagttagaaggaacactttaggggtcaggaagagggtggaaagcctcatgtgtgattgtatccggcttgatcttccttttggataagggccctgcttccctgcggcacagccacacatagaagtgagggtgctggggctggggtgactgggccaaaccctgagggaggactggatttgggtgaggggtgtttccaaagcctctgcagtcctaacaggacatggagtctgtcccagggctgccccactgggattcagtctgaagtcatccccgtctcattcaagagggcattgcagcaggatgtattgtggtcagactgtcaggattggcaggcagaaggctagtggactagcagtgtatactccagggcaatggacctttttcctctgggagaccagcctggaaggcagggggctggaaaagctgagcctgtaggtcactgctccaacagcctgggtttgggttcattgggtcagtggccaggcctccctcttgccttgtgtttggtatcaggtggctctgggctttctgggcagcatgtcggcctgatttgagcccacgtgcatgggtaacacctccttgcccctggctgttgtttctccaggtctggaggtggccctgggtatgactggaggaagtcctgttcccttttactccagcctcctattattgcaactgtttccttgtcacctgcctggcccaacttcttttctgtttattaagagaaataaatctgatcccactaatctccactggcaacgctggccaggaacgggaagcctgcagaaggcttaactctttcagggagaatgttcagaatggagattgggagaggtggggaggagggatacacaggagattcctgggaggtcagggatctttgctggggaagtcattatctcctccattccaatctctggctcaaagacctatgagaggcaggtcttgattcctctaatctgactctcctactttaagatggaaaaactgagcttgtcatggagttttgagcaccagtcttccatgattcccttgctgacctcactaccctgcacaaacttagaagaagagaggaagtctgacatttattgattagtctgaatatgtcaagatcttacttgcagatgaaaaaattgaggctcagggacagtgagtgactgatttgaccaaacggatttaaactcaaatcacctgcctcaaaaatcgggactgttttcatgactctcccaaggacatagagcagcaggtaaggcttgaagatcttcttgttcaactcactttacagatgggaaatggcccagagagagaagtgagggaacttgatagagtggggagagtatcagaatcaggccaatgagagtttaaatcctggcccagctactagcaagccccatgatgtaggatgagcaacttctcagtgggctccctgattccaccactgtcttgtggggaagaaagggggaatcctctggctggacattgccttgatgggctgtgacctttctgtctcaccaagattctcacaagagagcatatgaaaattatattaaaggctgggcgtggtggctcatgcctgtaatcctagtattttgggagaccgaggcgggcagattgcctgagctcaggagttcgagaccagcctgggcaacacggtgaaaccccgtctctactaaaatacaaaaaatttgccagacaaggtggcgtgcacctgtagtcccagctacccggaaggctgaggcaagagaattgcttgaactcgggaggcggaggttgcagttagccaagattgcaccgctgcactccagcctgggcaacagagcgagactcagaaaaaaaaaaaagaaaaaaaaaagaaaattatattaaagagaagtaaccatagaaatgcaaggggttgctatgcctgtgtttataagtttagtcacctgagctctaacgacccagtctggaaggaatgggctctgggcctaagaacaactttgcttgactgggcgtggtggctcacacctgtaatcccagcactttgggagtttgaggtgggtgggtcatgaggtcgcgagtttaagaccagcctgaccaacatggtgaaaccctgtctctactaaaaatacaaaaattagctgggcgtggtggcgcgtgcctgtaatcccagctactcaggaggctgaggcaggagaatcgcttgaacccgggaggtggaggttgcagtgaggcgagattgcaccactgtactccagcctgggcgacagagcgagactaggtctcaaaaaaaaaaaaaaaaaaaaatggacaactctgcttccctggtctgcccctctcaagctacaagatgctggcaggttattcacccctccaagcctcagtatccttatctgtaaaatagggataataaatcctagctttataggggcctttccaggatcaaatgagctaacagacatgcaagtgcgttgtgaactgtggagcatggtgcagctggcagcaggtttctgctgttgttatgctgctgaggacttgagcattagttaagttcaccctgatccatgtttggaaaacagcccatgatgatgatgattattgagggggattcacagaggatagagtctcacctttgtcccacaggaggactcagacataagaaaaagttaaaaaaacaggccaggcacggtggctcacgcctgtaatcccagcactttgggaggctgaggcgggcggatcacaaggtcaggagattgagaccatcctggctaacatggtgaaaccctgtctctactaaaaaatacaaaaaattagccaggtgtggtgtcgggcgcctgtagtcccagctacttgggaggctgaggcaggagaatggagtgaacccgggaggcggagcttgcaatgagccgagatcgcgtcactgcactctagcctgggcgacagagcgagactccagctcaaaaaaaaaaaaaaaaacaaaaaagaacaagttaaaaaaaacaaaaacaaacaggaatccatatcttccagaaatatcacctggactctagacaagtgtgtgggtaggaagtgtttctgggacagatgccaggattggagcccagcagataatcaggggaggctttctggaggaggcgagcgcctatggaaggagggcagggtcctggctaatctgaatgggaagagaagtaacaggaaggctgctatgtgctatatataccctggccaggcattttcatcaaagtcttcctatgtccttacagcaacctgggaggtggacagttaccaccatttgtaggtgagaaaaaaggggtgagagtaagtagcccgaggtcactcagcttcatttatttgaagaggacatattctttactctggagtgtaaggcactgttcaaggtgatgtgaatgccagaggaccagacaggcaaggtccccatctatgtggaagtgaggttcacagcatcacaatgacggagccactcagtctgcctccagaggccacactctacaaagaaaattatatgatgatggctgtgtttctgactctggaggcaggtaacctctctagagttttagacaaaaccagttttggggaaaggggtatgtagtcctcctgagggtttctcttgtgcagtgggcagcggctgaggggtgggagtaggcatggctctgatactgagaatttgagagctaccctgccaggcctagctgacttagccccatgttaactccagtcagttcactgtggcctctccaagttccctctggccactcagggaggactgtcctttcatggtgtggagttgtggagagaaccctgagtttgagttctgctctgttgtatgaccttgggtaagtcctgcccctctttggaccagacatgccctgtcttgacaaagatggttttttttttgttttgttttgttttttgagacagagtctcactctgtcgcccaggctggcgtgcagtggcgagatctcaggtcactgcaacctctgcctcccaggttcaagcgattcttctgcttcagcctgggactacaggtgagtgccaccgtgcctggctaatttttgtatttttagtagagatggggtttcaccatattggccaggctggtctcgaactcctgacctcatgatccgcccgccttggcatcccaaagtgctgggattacaggcgtgagctaccgcgactggccgacaaagatggggtttaatggcctctgagactcttgctagttctaggattctgtgagtttgagaatgggctgagggagcaagcctgtaggggctgggggctaggcatggagatgggagctgtgtccaggaaaggagagctgacctccagccagccagataagacactgagacccagtggcctggatgtcataggaaggggagtaaggtggctgggcgtggtggctcacacctgtaatcccagcactttgggaggctgagacaggtggatcacttgaggtcaggagttcaaaaccagcctggccaacatggtgaaaccccgtctctactaaaaatacaaaaatcaaaaattatggccggacacagtggctcacgcctgtaatcccagtgctttcgggggccaaggcgggaggggatcacctgaggtcaggagtttgagactagcctggccaacatggcgaaaccccatctctactaaaaatgcaaaaattagctgggcatggtggcatgcatctgtaatcccaggctactcgggaggctgaggcaggagaatagcttgaacccaggaggcagaggttgcagtgagctgtgatcacgccattgcacttcagcctgggcaacaagaacaaaaagctccgtctcaaaacaaaaaacaaaaattagccaggcgtagtggcaggcgcctgtagtcccaggtacttgggaggctgaggcaggagaatcacttgaacccaggaggcggaggctgcagtgaactgagaccacgccactgtactccagcctgggcgacgggagttcaactgggcaacagtttcattcaaaactcaaaaaaaaaggaaggtgggtaaggagagtccattatgaacaatgtcatttctctctgctgaggaaggggcctagatagttccaaagcagtcagagtcaagtctctggggtcgtgggcgccttgcccttctgaggtcaggatggtgtctgtttgcccgtcagtcaacactcccatgtgttttccccttctgtgtcagttcctgtgctgcttctcctgcctggaatgtgctccccttcactttgctatccagtgaactcctattcagccctcagggcctggtgtcagtgtcatctctgtgatactcccaggggaaattattgtccccagaccctagagcaaggtgcttaagagagttggggttgggcagtatatgcttttccagccactttcttcttgggtaaagggcacctcagtgtccttacctggggcctggaccaatgtaataggggcggagttccctctgctatgggatacctccaataggggagtggtttcccagaggagtttggggtttctcaataagaatgtgacattttggcttcccagaaatgtaaaaaataaagagtgtgacagggtggctgctctgtctcccccagacccctgtgagaggatagacattgttttcctagggtccagacgggagagggagcctcactcacttatttcacagatatttcctaagtgttatataccaggcactatcctcgggatgaataagagagacaaagtcctgggcctcatgaacctcacgatgagtgtgtgtataggggggaaaatacgctgaacaagtaattaagggttaacaagtgtgacaaggggaagcacagcaatctctgagggaggtcagggatggcttccccagggaggtggcgcttgagctgaaatggaaggatgaaaggaagctgggattgaagggtttgtggcactggcctcaggcaaagcacgtgctagggacttgggaccagctggctatctggggttccgtgggatccagggattgctgtacctcactattttgaatacccgaagggcagagactgggttgacagactcttccctctgccctggccagcacaaggcctggctaagtggccttggatgataggtaatgctccagtatgggcccccagagatgggcatctccggatcctagactctcagagctcatggcccgagatgtcatagggagccctcatggtacatacagatggggcagctgaggcccggaggaggaagtgacttgctcaagttcacatggccatctagtgtcagaggcagaagaaaagcccacaactgccaggccttcagcttcttcactcctttcttcagacttcaaatggaaaatcgcatcccagagaggtgcctctgctaggggtgtgaagagctgagaaggaagcaaggccaagggagtcttccctgccctcccctcaacaccttcaggggctccttccagctctctctccctcacccttctcttggaaattccccttgggcctgaaaggggctctcaatcagtgtgctctccccatactgtaccctccctgcagtccctgaagcagggctcctagcaagggttgaactgtggtggccaagccctgtgaccccaaaaatctgcattctcttgtcagcagagggcagagtgagagcctcccctcagcacttgctccttggaaatccctctctctccagaccctcaaagctgtctcagctgctcatggcctgtcacatgctaaagaaaacgaataagaggaagcattgtatgttatttgggccacagtgaacatggtggggttggaggagcagggacacacaccttccttgtgcggacccaaaggccacctctagcccgttggcagacttggggaagtcagccaagtccctgcagcttccttggttaggaggagtgaaatctctgtccgcctcccccatcgttagttataccccactgtactctatgcccttgtactccactgtcctgaggggctgattcattaaaagactgtcagcccactcacagggtgcccatctctgtgcttggcatggaaggggcgatagagacagctcagctcacagaggatttaaaccctgaatcttgtagcaaagtgcgtgattcccaggaggctcctggtagggagattactaagtgaggcctcctgtctgcttaggacaccccctcctccaagtctagccaagtgaggtcttccccaccattttcatttttattttttgagacagagtttcgctcttgtttcccaggctggagtgcagtggtgcgatctctgctcaccgcaacctccacctcctgggttcaagtgattctcctgcctcagcctcccgagtagctgggattataggcgcctgccaccatgcccagcaaatttttgtatttttagtagagacggggtttcaccatgttggccaggctggtcttaaactgctgaccttgtgatctgcccgcctcagccttccaaagtgctgggattacaggcatgagccacagcgcccggccccttttatttatttatttatttttttgagacagtctcgctgtgtcacccaggctggagtgcagtggtgtgatctcagctcactgcaacctctgactcccaggttcaagcgaatctcctgcctcagcctcccaagtagccgggactacaggtgcccgccaccatgcctggctaattttgtatttttagtagacacggggtttcaccgtgttggtcaggctggtcttgaactcccgacctcaggtgatctgcccgcctctacctcccaaagtgctgggattacaggcatgagccaccgtgcctggccttccccaccattttctaagagggtcacgaggcattccagctcattcttgtggttcctggagttctggtccatatgccttccataccacctacttcttcccaccagtcctagcctagcctgtcctgtgttcttggcagtgggcagtactcctcccacaggatcctggagcaagcactgcctttgcagtgaaagtatttatgcgctatcatcactacctccgtcagtatgcaagcgtcaccgttgctactacagctaatctacaagccccaccatctccacctccaccagtttctattaaacacataggtacacctactatgtgctgagcctggggttactcaaaggagtcagacaatcactgctcttcaggaaactgttctggttggaaaggcagacactaaaactattgtctgaaggcaagttctgggatggtgaacacggggtgcaggggagccctggggtgtgatcagtactatatcagaaggcagcactaatgtctgtggggccttcattaaggaagcactgagctgggggaagagggggtgcaaggaagacttcatggaggagcagcatgtagagcagggcattgagaatgaaaaggcacctttcaggccaaggtggaagaggggatggcaggtgtgaacgcctggagttgtgtgctggagggtggcaagcagttttgtgtggttgtagctctgagaagaagattctcatctcagagatgaggtcggagatgaggctgaactggtgggcaggggcagctcctccaacgcttcttgtgaaggccaaggaacctgccacacttcagaaatcctttgagcctcttcacatacctgtcctcacttaattcatgccaagaaatttagactttatccttgggtattccctctactcccccatactaactgttctttttatgggccccagtttccctatctatataaattcagggaattggctagctgatctccgaggtctttttcagctttgacactaggaccattttctctgtgcaaagtgtacacgcagcttggtacacagtgtatgctcaatgaatattttctatgggtgaataacttgccagcctttcaaggactgcactgttgtcaacctgagactctagcaagagaagggcctcagagagagttgggtttagctttgactctcacattttgcagggagggaagagggtttgctggagccatcgggcataagaggtagcacggtatagtggaggggcttgttctggtggcaggaaggataagccatgtggggtctagaactgagggctctagacttccagcccagtgctctctctgctctaccatgttgcctctagttggagagacagggcagaagtgatggtaaagaagagttattgcccaggcaatggggccctgggcaggtccctcagcacaaggacacctgtgatgaggagacagaggtgggagcgccaggcagcctagaaggcttttcttctctctgtttttaatttttcactctgtcacccaggctggagtgcagtagcgtgatcttggctcactgcaacctctgcctcccaggttcaagcgatcctcccacctcagcctcccaagtagctgggattacaagcatgagccaccacgcctggctaatgttttgtgtttttagcagagatgaggttttaccatgttggccaggctagtctcgaactcctgacctgaagtgatctgcccgccttggcctcccaaaatgctgggattacaggtgtgagccacaatgcctggcgtttttaaagaaaaaaaaaacatgcacacacacacacacacacacacacacacacacacacacacacacacacatatatatatatatatattttggtttttttttttttgagacggagtcttgctctgtcacccaggctggagtgcagtggtgtgatcttggctcactacaacctccacctcctgggttcaagcgattctcctgcctcagccttctgagtaggtgggattacaggcatgtgccaccaagcctggctaatttttgtatttttagtagagacagggtttcaccatgttggccaggctggttaaaaaaatatttaacaggccgggtggtgtggctcacgcctgtaatcccagcactttaggaggccaaagcaggcatatcacctgaggtcaggagtttgagaccagcctgaacaacatggtgaaaccccgtctctactaaaattacaaaaattagccgggcatggtggtgcgcacctgtagtcccagctactcgggaggctgaggcaggagaatcgtttgaaccgggcaggtggaggttgcagtgagccgagagcgtgcccctgccctccagcctgggtgacagcgagacttggtctcaaaaaaataaaaaaaataataaaaaaaggacctaccttacacaattgtggataaaatgaagtaatgcatgaaagcggttagcacagagcctggcacatagtaaacactaagtaaaagggtgctactattttgaacactgtaactacagaaatacagtcagttcgatacatttgtacacacaggcacgtgacagtcacggggaggtggctggtgggctctagcggcagcagggctgcggatccgcgttctcccagctccattgcactcctcagagcggtagcctctgggctgagagagtgggcaacccgcctgccccacctggactggccaggccttcccctgtgcgccctaggctgggcggctcagccggtctcccaggtcccgggaggggcggagccgacgggatgcgcgccaggccccgcccctcctccgggcccgcccccggcctggccattggccgcagagctcgggggcgtggtcgagctggggctgggggcgcccgcggtgcccgcccgcgagtctcgctgcctccctcccggggctgcgggcccggcggccgggctggctgggccgcgcttgggttcccgcgccggctcccgcacccgcaatggggaactcacaccacaagaggaaggcccccagcggtccccgggtccgcagcttctggcggttcgggcggtcggcgaagcggccggcaggtaggggccggggtgggggcggggcaggcagggaggagggtccctactgcggtcgtcgccaccgctgctgccccctcccggggcttggagggtgtgagtgtgggggggtcgggaatccccgcgcagaccccacccctcacaggcacacggagacacacgtacacggtaatacctacgggcgggcacacgtacatgttcgcagtttacacagtcacacgcacaacacccactcaaatgtacggacacgcagacacaggatcacatacaccatcacacccacactctcgtaccatcgcagtaggacgcacacagcctgagacataggtacatgtatacctatgcatgcggtttacacagccacacgaactacacccacgcgcagatccagacacacaggcacacagtcgttcacacacatcggtcatgtgggtacagttgcccagcgtcttaggcacacagatgtacacacaggttcataactgcacaaccaaccggactcgcattcaggctcacagcagaccctaaggcactcggacacacacgcttatttcccagatcttagcccccaacaggctgaaggctgaaagtttgtaggagggaggggagacaaaggtggaagggagaagctggaaacccggggctggagtctggggaccgcctccatctggcgcgatcgggagtcggactggttttcttggctccctccctacccccacccgcgccaccgcgacttctccccgcctccccccctcccccgtccccacggtccccgaggtcgccgccgcatctccccctttcaatgcagccaccgagctggaacgcagcccttgccggctgctgcgggatccctccgcgggtcacattccaggctccaatggggaggggagggaaaggggaaggcctccaatcccaagagatgggattcctgtttcccccaacaagtgcggcagttcagggtatccccgaggggcgctgaaggaggggctatcgagagtgcctagttactggtgaatccagagatgggggaagggcagggtgatggtaccattccctcctccccaagatagagggtcttcaacataggcaggcactttagcgatacctgttggtctgggggagtgaggaaatcccagaggaggtggagtgaagggggccctgctgtggtgggagaatctacgggtgtattcccaggatggcccacattcctagagattccgaaccggagcttgatgatctcatcgctccatggagggggtggtggaaagagcctgggctgggaagtgggggacctctcctctcaatgaggctgtggaataggccctggtgaccttgagcagattcctttcacttgtctggaccactctggctcctacaggggttctgtctgtgaaatcaggggccctaggtgacttcttgggacacttactgttctggctagccatttcatggatgacgagactgaggtccaggaaagagggacttgtccaaggtcatttgcctgtggtggtttgaggtagtaatataatcaaaatgacaataagaaaagggttaactaagttcagttaggctctttgaggatttctcagaaggtaggtgttgatgagaatctccaggaccttccagcactctccctgccccagcagtcctgaaagccctgtctgtgcctacctgtctctcctagaatctgcactaagggggcagggctggggctcttcatctgtcctctgatggtcgctcggatctgatggtttcctaggaactaactgtgggcccagacttgtgaccatttgtgatggaggagagagaagataagaaggctgtgtttatagtctcttgcctactggcccttgaggaagtggcctggggcttccagcaacacttgtgagcttccagttcctgctgcaacttatgggtcaactcaagctttaaggcgttctgaaaaaaattagaaagcaatgtcaagacaacacagaaattaagtgtgaggggctaggaaatattctaggcaatatatcaaaagccttctgggttggggtcagctttagaaaactgaggagatggtcctaatttgtctttgaagtaatcacaggattgaaattagtcctaaattgttggttaaatgagagaaccagggatttgtttcagctgtggggtatggccgtgagtaaaggcatggagttgaggtcaggcgaggtggtttatgcctgtaatcccagcattttgggaggccgagatgggaggataacttgagcccaggagtttgagagtagcttggggcaacatgacgagaccccccccccccgcccatttctacaagaaataaaacagtatctgggcgtggtggcacatgtgcctttggtcccagtagcttgagaggctgaggtgaggggattacgtgagcctgggaggtcaaggctgcagtgagccgatcgtgccagtgcactccagtctgggtgacagagtgagaccctgtctccaaaaaaaaaaaaaaaaaaaaaaaagaatgggctggatgcagtagctcacacctgtaatcccagcactttaggaggttgaggtgggtggatcacctgaggtcaggagtttgagaccagcccagccaacatggtgaaaccccgtctctactaaaaatacaaaaactagccaggcgtggtggtgggcacctgtaatcccagctacttttgaggctgaggcaggagaatcacttgaacccaggaggtggaggttgcagcgagccgagattgcgccactgcactccagcctgggtgacaagaactcgactccatttcaaaaacaaaaaacaaatggagttgagactgagcatggaggtgggagggaaaagtagctgagggtcctcttgaggttccattgtgaatgtaaacctcggtacctttggttttacttgtgctgaggatcctaagtcatcctcggcctcagcctctgctgtgacaagcccagatggggactggagcttgagtataagtactcaagtgccagtataagtactcatttcattagtctgtgagaagaggaaggagagaatacaaggcagggagagaggtctggagtctgcaggccacagggagccagtgaaggtgtttgagcaagggaggagtctacaaaagtggggtgttaggaagatggctctagggtgggggcaggtgcaggcaggacaggttgaggggtggggtggtgagagtggaggctcagagactgttgcagtaatccaggggagaggtgatgaggtgagggctggggacagggtgggggttgtgggagtggagaggagtggcagctgcagagacacttcggaggaagtggctgaattgataagacctgggattaaccagatgttgagagtaagggccagagggagctgtgtgggcttctgtgcttgaggctgcttggctgggagatggtagcagagataaaaataagtccctatgctgtccctttacatcagttaattcatttgtcctttgtcctccaacagtcccacaagccacaggctattctcccattttagagatgaggaagctgagttcggagaagtgaagtcactttctcaaggccacacagcaaggagatggctgaatctggattaaaactcaagcctgtcacattacaaagcctgtgcccttaatcagtttaggaatagaagggtgtcatcttatgacaccctgcacgtcctctgggcagagaaagcctgcggccccggccccgggggatttggactatgtaaagaggactagtggaggaagcactgtggggagggttaggggttgaggactaagcattaaagcctccaagcgcttagagaggaagcaagtgggaaggggaaatcaagactcaaggaagcgttgatcccgcagatcaaatgcccttgtaaggtagagaagggtgaaggtgtatgaggtgaggcctcctgactgctggaaagatactgtaacctgccgggattgtttggtcttggcactcagggatccacccaactctccccttcccaggctagctgagcactcggtcctgggtaggttggggaatggtggtggatgtgaattggtaacccaggaagacccgccctcttccttttcccatgcgttgcactgtcaagctcacacacatggccctccttctggttggatttattgttcccattgtgcacatggggagactgagggaagggactgctggagtcagaccatctggaattcttttcatccttccccctgcctgtagacctggaggtttaacttcttggagtctggggtctttggtaggttccacagctggacaaggctccctcctccattccccccatgtctcgtcccctttcttgtggggagacttgtgatcaactgcttgggtgacttgcttgtgggagccccgggcttccagataagaggctggtccagctctctctgatcccagggatctgagataagcggaatctccttgctgccccaggccccgactcaaggaagggaagcactgaccccccttccttctaggggcaaagtcatccatggtgagggctctttgaagatcatctctccaacccctgccacatctcagatgaagaaactgaggcccagaaaagcacagtacctggctcaggatcatgttgcaattaaggggaaatgaaagctccaacctaggaatcctcactccagggcagtgagatctggtctgggcctggaattcccttccttcccaaactgaggggttagggctgccacatggaggggtgtcactaaggagagatagggagctgatgtcaagtgttccttatcagaccttatcttaatggtccttaaccttacttgagatttgaagagagctggagtggtggggagaggaggctgctggtggcataggaagaacatgattttgcagccagtcagagttgggctcacatcctgcctctgccatttctagcagtgtgaccttgggcaagtctctgacccttggggtcagggtttacactagattgtgtggctttctttaaggttcccaggcactctgtgatgtgggtgttagtcccaccttacagatgaggggactgaggcccagagaggccaattccttcatccaaggcctggaatccagacctcctgattcccagctctttcttctccttactctgtggtgtctgcctctggcatccataagatggggataatcatgccttgaaggaactaaggaaagggctgtggaaagttagaattgcgccttggctgaaagggattattatgtcattgctgggagcaaatactggcccagaaactcattaggacatttattaatattatcgtagctaattcctccgtgcactactgcctgttcccccagggcaccctgtgggatgggctcctcccctccctgctctgggcactccctgccccccattatttaccttagaaccggcctgtcagctctgtccctgctggggtggggctggacaccaagggaaggaaggagagggattccggcacaggtggggtgcagagcccctactttctttgggcagagattgaggtcgtgcccctcccccaactgcccttacccattaactttctcagacttaggatcactaaggttgttggagtgagacccaggttcaaccactccctggttgggtgaccttgagcaagttagtcactttcccttgagcctcctggtgctcatttgtaaaaaggaaaccactcctgccttttaactttcttgttaggtgttctgcgagacagtagaagagaaagtgttttgagaaccgtaaagtgcctccacctgaaagtttgttatgctcattttcctttgtcttgcctctttgggaataaaatctacattctggtttctgcttctgcttctagaatgtgtaatggttggggagcgggggccttcgtttgtccacctgtgcagtgaggggttgaggctaagggcctctgaacacccagcattctggctcatgggctggccagggacagttcagacaggagtagggagttgggggctgggttggcttcagagggttcggcctcctgagcaaggccacctggacagctgtgccctcccccttcattcctctcccctgagtcaggcctgcctggctgtgggcgcgccaccacccccgccccttgctctggaatggggcaggttgaggcctcaccccatggaggatgttgccaagacagtgcgtgcgcatgcgcgtggccttgggaggcagtggctccctccccgattcttccctttccccaggcttaggaaagcccctgagtaggggctacacacacctgtttttctgtacacacagccccttggcaggccctgtgtgggtctgtgcggtcgctcatgggtgaggaaggcagggactagggtggcttaggtgtgctttatgggtgtgtgtgtgtgttttttttttttttttgtttgagaccgagtgtcactctgtcacccaggctggagtgcaatggcgtggtcttggctcactgcaaccttcgcctcctgggttcaagcgattctcctgcctcagcctcctgagtagccgggattacaggagctcgacaccatgcccagctaatttttgtatttttagtagagacgggctttcacggcgttggccaggctggtcttgaactcctgacctcgcgatccacccgccttggcctcccaaagtgctgggattaccggtgtgagccaccgcacccggccatgtgggtgtggttttgagagtgcccacctgcggaggtggccccagtgggacgctgcctgctgcctgagtctctgccctggtaaactgtctctgagttgaggagcccgcaggtgtgcttcccggtgtgccctccgtgctgggggcgtggccaccaggagcaaggtgtcttctcagatccaggaagcctcctcccccaggcatgttggggatgggggtgtggtatgggatgcttccctcatggcctcagccctaggctgcacctctggactgccaggggcagaaatccctggaacaaggactctaagcgtggctgtgggcaaggtctttccactctctggacctcagtttctttgtgaagtacccctcccagtcacctgagactcaggttgctgagcccctccccaagcgagccacaggtgtatagatctggggtgactcggagaggctgcgagctctgacttgggtggggagggggaggggtgtcgctggggcaaccagatgttatcaagtgtaagcccttggatctctgggaatttgcagctgtggccctgactgccagctgtgggcctgggaccttgatgagctgatgttcctccacccccatcttggcaggagctcagcccttagtttccctggttagagggtagctgaagatgactgtcctgtgtggtgaaaggctccagttttagagccagccagagttcaggaagtcacttagctctctgagcctcgcaggcccatgatcaattactaggaaagtaccttccagtacctgcctcgaagaacttttgtaagagccatgaggacagagactacgttttgcctttcaccacgacctggcatggtgcctggcatgaattaatcaccctgcaaatgtcggtctactggtcttttctgtttgtgtgagactgataagaagagtgggtgggtgggtggatctggcctaagaggggaagagtggggaaggtaggtggtcgagaaacctccaatttgtagggatgatggggtcccatgaccctttttcagaggggagatcaggtttgtagctggcacagtgcacagaacgtggcttttggattcaagttgttctgagtgagaatactgctttgccatttacaccatggaggccagagagggcagctttataatgcttgctccctctggtttccatttcctcatctataaaatgggaataaaagtgcctacttcttaggattattgtttagatctcattgatttgttgatgtgactattcagctccacaaatgtttgttctctggagagcaagatctcagcttgtacttgagtagtctccaagaggccagtgttagggtggcagcaactggggaaggaactgcaggggggtcgtgttgcttgggagcctctgtgaatttttagttccctagggactcagagagaaagatgctatgacagagaggtgtccttaggcacggctggtgggatactgcacagatacatatatatagttcacagactctctttcacagtctctgctatgttttttagagttatcaggggaatcttttttttttttaagctttatttttatatatttacttttttttttttagagacagggacttactgtgttgcccaggctgtagtgcagtggtacaattatagctcactgtaacctcgaactcctgggctcaagcccagcctcccaggaaatcttttatttatttttttttttgagacggaatttttttgctctcttgcccaggctggaatgcaatggctgcgatctcggctcactgcaatctctgcctcccggattcaagcgattttcctgcctcagcctcccaagtagctgggattacaggcgcccgccaccgcgccttgctaatttttgtatttttagtagagacgggctttcaccatattgaccaggctggtctcaaactcctgacctcgtgatccacccaccttggcctcccaaagtgctgggattacaggcatgggccaccacgcccggcccggtcttgaactcttgacctcaggtgatctgcccacctcagcctcccaaagtgctaggattacaggtgtgagccacagtgctagcctggaattttttttttttttttttttgagacggagtctctctctgtcacccaggctggagtgcaatggtgcaatctcagctcactgcaacttctgcctcctgggtttgagcaattctctcacctctgcctcctgagtagctgggactacaggtacacaccaccaccatgcccggctcatttttgtgtttttagtagagacaaggtttcaccatgttggtcaggctggtcttgaactcctgacctcaagtgatccacctgcctcagcctcccaaagtgctggggttacaggcgtgagccaccgtgcacggccagaatattttttaacagtgtcactacccagctgaaaccctcaaggcttatggggcccagcctgacctgtcgcctgctctcctctgattccgtctcctaccattctttccattgctcaatcctccagccatactggcctcctctctcttccttgaaatccaccactcctgcctcaaggcctttccacttgctgtagcctgtctagaagactcttccccaggtacctgccctgactggctcctcagtattcaagtgtcagttccaatgtccttttctgtttattttattgtattttatttatttatttttgagacagagtctcactcttgcccagactggagtgcagtagcgggatctcagcttactgcaacctctgcctcccgggttcaagcgattctcctgcctcagcctcccgagtagctggaattacaggtgtgtaccaccacgcccggctaatttttttgtacttttagtagagacagggtttcaccatgttggccaggctggtctcaaactcctgacctcaggtgatctgcctgccttggcctcccaaagtgctgggattacaggtgtgagccaccgcgcctggctgattttattttttaaagatgcctgtcactcaggcgggagtgcagtggctcaaacatggctcacggcagccccaacctcccaggctcaagcaatcctcctgtcttagcctcccaatatctgggaccccagctgtgagtcaccacgcctgggtaattttcaaagttttttgtagagataggatcttgccttgttgcccaggctgatcttgaattcctgaccacaagccatcttcctgcctcggcctcccatagtgctgggattacaggtgtgaaccaccatgcccagcctattcttttcttagaggggcttttcttgacaacctaactaaaccactctccccgccccccggccccaccaaagcttcctgttacagctctggagtcttcactacccaaaattacattgttagtttacctcatccatgtattcatcaaatattttttgaactcaactcataacatgttccaggcactgatttagcctctggggataaactggtgaacaagataaagttcttctccattaactatagtccctagtactaggttaacacatgtttgctgatcaagtgaatggatacaaccatcttgtttttttcttttttttttttttgaaatggagtcttgctctgtcatccaggctggagtgcagtggtgggatcttggctcactgcagtcttcggctcccaggttcaagagattctcctgcctcggcctcccgagtagctgagattacaggcatgcaccaccacaccaagctaatttttaattttaattttagtagagacagggtttcaccatgttgggccaggctgatctcgaattcctgacctcaagtgatctgcccaccttggcctcccaaaatgctgggattacaggcgtgagccacagcaatcttaaaaagaggagttattagccttattttcatatgagatcgtgacttgtgtgatggagctggatttgaacctcgacctgacttcttttccagtacttctccacctcacctccttttttactgccttcacccatggactgtttcttggctaattctgttctccctgcctggtgatccaggacagaatcactgacagcgtggggccaatgtgaagaattccaggctaggggagaaggaggtctgctttgaagtctagcctctgcaagattaagtgtgatcttggagagtttactgtgtttctctgggcttctgatgtcacattgccaaagtaggaagaaagtcctttggaaagtgtggggctgaacctatgtatgaggggctgtactgccagccactgtggttctgctctgggcatctccctggcttcccaggactgtgtcctgggactggcccctgcccctctgggggcctctgcccacagccttgccatcccactagcagctctgggctcctgcctggctgctgcaggctccgagctctttccccagggaattacgctaggcagccaggaggcttgcaggtgggcaccctgccaagtctagtctggtagcccctccacctaccatctggcagctgggacccctgccttaactctggacttgcaggcagggtgagtgatctgctgctggattgagtatcttcggtcctcctaatcatactctactggagcagagcacccacggactcctggcctcagttgcctttctgtgcccctgcaccccatttaaggggtggggtcggcagatgggcgggatcagtggcgaaggtgggaggaggacatggagagcagcccctccccctcctctgtctggagccggtgctctgcggcggggcgggagggctcgcatccccatagtgctgggttacagtgaaggtacgccccgcgctctgctctggagaggcagggtgggatagggaacgtctcgagtggcgcccgcagtcatggtggtgttcgttggccgccgcctcccggcgctcctagggctgtttaagaagaagggtgagtgggtgtggcttggggggaggggagggatgctcgatgcctccctttcccagacccttatgtagaatgaggaatcaaggctgggcaaaagtaatggggtggggctgggggctgataatgaggccagaatctcccatccggctgtgcttttgtccagccgctttgttgctgcctttgtctgggccctgcttgtgggttgggaggatggatccaggtgtctctgaccttgaagcctgcagccctcccgtgagacttgcctccctgccggggtacccacactttactgggtacagcctcccagtcaagatgtactagcctttcctagtgtgccggggaggatgggacgtgggcggcccagaagagaggagagtagtaccactggaagttgggaagcctgctcagtgaaatcctgtttagaggcctgggaatggagaagttttggagggaggggcctgttcctccttccttctcctaggaattgggctttcagacctggattaagacatagggacaagagtttattggacttttgagggttgggggcccctactctgagtgtgatccgggagtcccctctgggaacctggagttgagtccagggtcagtctgactcctactgctgggtgaccttaggcaaggccttgcccctttgaaccgtttccccacttgtaaaatctggggatctcgggcactggtctggttggatctgttgggggcctcctagctctgacctgtgggattcctgcagactccctagggcaggagctctggctgttgacgaatgggctgagggaggaggaaaggcaggtttctgaactgaagaccctgctcctggagcatggccctttaaagggcttgttttgttcccgtccctttataaggtgttaccaaggtcacatgacccttccagcgcttttgcttatgttgtgggtttcatttaaagggggggctggggctgcaaagtgctgacacagccccccatccccaggattagatggccagcccctccacaggcggggcttgtaacaggatcctttgtaatggatccctggctcctctgcaacaggggccagggccagggccagggcctccaggagagggggatacctgggactatttccccaagagagactggagctcccttgggcgggtggaggggcctgggtctttcttctcccctcccctgcccatccttccactaaggggcagccacatgggtgagtaggggacccaggaggctatctccttggtctgcatcccccctaggattttctgggaatatggttgtaactcatgccagctgtctctccttcctgatttcccgtgatatcttcttcctggacctggttcaagtggtggcatgaaaagagtggtttgttttcctgtgaagtggggttttgggtatggaggcgagagcaatgtatttactatgggctatgtgtatactcgggatgttttttgtggggctctgagtgacgtgtgagtacatagtcgtgtgtatacttggttactgtttgtgtatatacagagcagggactgtgggtgttgtgtgtttacgtgcgggctgggtgtgcttggtgtgtgtacctatgtgtgtttatactcggatgccctttgtttatatacatgaatgacatctgtgagtgctgtgtacgtacacagtagacctgtgtacctgtgtgccctgtgtgtggggccttatatggggccctttgtgtggtgtgggtactcagatttatgtacacttgggtgtagtttgtgtatatgggggctgtgtgtgttgagtgtttactccagaactgtgggttatgtgtccagactggggaagggggcattgcttgtatatgcaatggccgtgtgcagtctggggaccatgactgcccttgccgtgagacctgtgcccctgcagggcccagatgcctttacctcatttcccttcctcctccctcctactaggctctgccaaggctgagaatgacaaacatctaagtgtagggcctggccaggggccagggtctgcagtggatgagcaccaggacaacgtcttctttcccagtgggcgacccccccacctggaagagctgcacactcaggcccaggaggggctccgctccctacaacaccaaggtaagcttcctctccactcccctcccctctcctccctccagtgctgcactgtcagctgtcaaggtcaggggcctaacccaacagacccttctggtgtcttccagagaaacagaaactgaacaagggtggctgggaccatggagacacccagagtatccaggtgagccctgcctccagctcagtcctgactcttctctacctgcttgacccctggcaaggatgtcttggaacatttctgggtctcagtttctttatcacaaagggctacactaaatgaaccctgagggctagttcagggttgctcagtgctaggtgatgctggaggggatctgtgactcaaaagttcgagtgggaggctgggcgaggtggcttacacctgtaaccccagcactttgggacgctgaggtgggcggatcacttgaggtcaggattttgagaccagcctggccaaagtggtgaaaccctgtctctactagaaatacaaaaattagccaggcatggtgggagggtacctataatcccagctgcttgagaggctgaggcaggataatcgcttgaacttgggaggcggaggttgtggtgagccaagatttcgctactgcactccagcctgagctggatttgtctcaaaaaaaagttccaatggggagccttgaggagacagccccacccagatctccttctaccctgatagtcctcccggacggggccggatgaagacaacatctccttctgcagtcagaccacatcctacgtggctgagagctccacagcagaggacgcgctctccatccgctcggagatgatccagcgcaaaggtggattcatgggcaggggagagggacagtgggctccattgggtcccagcatctgtagcttcttttcctccttatccagtgtttcaccaggctctctgattcaatgaattcgggaaacacagtaccctgtgtcctcttgcacattcgtgatacacactaactataaagcagttaagagttagaaaatcttggcggccgggtgcggtggctcacgcctgtaatcccagcactttgggaggtcgaggtgggcgggtcacgaggtcaggagatcgagaccatcctggctaacacggtgaatgaaaccccgtctctactaaaaatacaaaaaattagccttgcctgatggcgggtgcctgtagtcccagctacttgggaggctgaggcaggagaatggcgtgaacccaggaggtggagcttgcagtgagccgagattgcaccactgcactccagcctggtcgacagtgtgagactccatctcaaaaaaaaaataaaaaaagagttagaaaatcttaactgttggaagcctggtgtaactaactagtgccagctgtgtgaccttgggaaaacccttaacctctctgaacttctgtttgatgttctataaaaatgaggataagtaccctattggaatgaatgccaaatgtttagaatgacgactaacacgtaataatatgtttactaaatagtaagctatcactaaagggaaattaccatcattgacttagtagccttagtcttacagaaagaagcctctagctttgtttaacctagccttgcccatacctacttgactgtggaaaccatttctcgcagagctcttattacaaaagtagtgccctgcagaatgtgcctggagtcctttgctctaacagtttttctcccacgactggcccccaggctccaccttccgaccccatgactcatttcccaaatctggaaagtcagggcggcgtcggcgggagcggcggagcactgtgctgggactcccgcagcatgtgcagaaggagcttggtgaggcctgggttaggagggcagtggtggggtgggtggggagccttggtcatcccctctctgctgaccccacctcctccctgtcccttccaggcctgaggaatgagcgtgaggcaccaggcacgccccgggctcctggtgcacgggatgccgtacgcatccccacagtggacggccgcccccgaggcacctcagggatgggggcccgggtgtccctgcaggcgctggaggcggaggcggaggctggcgctgagacagaggccatgctgcagcgccacattgaccgtgtctaccgggatgacacctttgttggccggtccacgggtacccgggccccaccattgacccggcccatgtccctagcagtgcctggattgacaggaggggcagggcctgcagagcccctgagcccggccatgtccatctccccccaggccacctacctgtcgaagttgattccacatgctgtgctgccgcctacagtggacgtggtggccctaggccgctgcagcctgcgcacactaagccgctgcagcctgcactcggccagcccagcctcagtccgctcgctggggcgcttctcctccgtctccagcccacagccccgcagccgccacccatcctcctccagtgacacctggagccactctcaatcctccgacaccattgtgtctgacggttccaccctctcctctaagggtggctctgagggccagccggagagctctacggctagcaatagcgtggtaccccctccccagggaggcagtgggaggggctctcccagtgggggcagcactgctgaggcctcagacacactcagcattcggagcagtgggcagttgtctggccggagtgtgtccctgcgtaagctgaagcggcctccaccccctccccgccggacccactccctccatcagcggggcttagcagtgcctgatgggccattagggttgccccctaagcctgagcgtaagcagcagccccagctgcctcggccacccaccactggtggctcagaaggggcgggggcagcaccctgtccacccaacccagccaacagctgggtacctggcttgtctccgggtggttcccggcgccccccacggtccccagaacggacactttcgccctccagtggatactcgagccaaagtggtactcccaccctccctcccaagggcctggcaggtccccctgcttccccaggcaaggcccagccccctaaaccagagcgtgtcacgtctcttcgctcccctggggcctccgtctcctcttccctcacgtctttatgttcctcctcctctgacccagccccctcagaccgctctgggccacagatattgacccccctgggtgacaggtttgtcatacctcctcaccccaaggtgcctgcccccttctccccacctccctccaagcccaggagccctaacccagctgcccctgctctagccgcccctgctgtggttcctgggcctgtttctaccactgacgccagtcctcagtcccctcccactccccagacaaccttgactccactgcaggagtctcctgtcatctccaaagaccagtcacccccaccttccccacccccatcttatcatccacccccaccacccactaagaagccagaggtggttgtggaggcaccatctgcctcagagactgctgaggagcccctccaagatcccaactggccccctcccccaccccctgcccctgaggagcaggacctgtccatggctgacttccccccaccagaggaggcttttttctctgtggccagccctgagcctgcaggcccttcaggctccccagagcttgtcagctccccggctgcttcgtcctcctcagctactgctttgcagattcagcccccgggtagcccagaccctcctccagctccgccagccccagctcctgctagttccgccccagggcatgtggccaagctccctcagaaggaaccggtgggctgtagcaagggtggtgggcctcccagggaggacgtaggtgcgcccctggtcacgccctcgctcctgcagatggtgcggctgcgctccgtgggtgctccaggaggggctcccaccccagcactggggccatcggccccccagaaaccactgcgaagggccctgtcagggcgggccagcccagtgcctgccccctcctcagggctccatgctgcggtccgactcaaggcctgcagcctggccgccagtgaaggcctctcaagtgctcagcccaacggaccgcctgaggcagagccacggcctccccagtcccctgcctcaacggccagtttcatcttctccaagggctctaggaagctgcagctggagcggcccgtgtcccctgagacccaggctgacctccagcggaatctggtggcagaactccggagcatctcagagcagcggccaccccaggccccaaagaagtcacctaaggctcccccacctgtggcccgcaagccgtctgtgggagtccccccacccgcctcccccagttaccctcgagctgagccccttactgctcctcccaccaatgggctccctcacacccaggacaggactaagagggagctggcggagaatggaggtgtcctgcagctggtgggcccagaggagaagatgggcctcccgggctcaggtacagtgggcagtgctagggtgaggtcccattgctgatgatgggaagtaggaatctgaagtcccgccatgggggatttgttcttggatctttaacttttctggtctgagaatgcctgggaagggcaagctgtcacccttgctggggcccagaggagaatggtgtgtgagtgtcaggcctactgtgtttgaattccaactttgcctctttccctacccttcctagctacattgtaaagtgtggggcagtgacacctacattatagtgtctgaacatgtgtagggtgtccagcccagtgctgcgggcactgtcagtaaatcaaagcggtaagaaggttgggtgagggtatgctttgttgggctcctagtgccagaaccaagccaggaggccccttgctaagtgtctcttatttttctcccccagactcacagaaagagctggcctgaccaccaggcacctcactggcactgctgacccatcccagaaacacaatctcagggacccgagcagctccaaggacgagaggatacagcagacacaacctaatagagagggcgcctgcagccttaacctccacggccttcgatacttatgcaagcctggtgttgctcctgtcctcagagtcatcctgcgctcatgccttttcccgaatgggttcacctctggcagttgccgcttcagtcttggccttagcctcatcttgaagtgggtagctggcgggagagggtggctgcgccccctgctggccctgaggctgcagagttgggagcaggacacctcacctgagtttcattttttttcatgtccaaaccatgcacatactatagtccagaatcaaagcacttttgaaaagtggctgcatggccatcctccagggcccaggaagttgcattccaagggcctgtttacatggcagcagaatccatccccggcagtcagcccatagcttgggaccagtctgtgccctcctgcccagtccagtttactcctcttggttcctgaaggtggccaagtcattgtgttcccacaggcttctctaggctgggggcaggtgtggggctgtggaattccaaagcacaaaaggtgcagaggggattggccttcctgtgcctcaactcaccaaccaccctcctgccttccagttctgccaggtgctccatgctggggacaagtaggagactgccagggcccaaagaaatgggtgagcagtagagtcatctcggggcacttggcagtgtcaagcacctgccccttgcctccttgaccacactggggtgggtgggcccccagcacttcagaggcaggagcctttgggctgagcaagcactgaggaggtggatggaagggagcatctggagggggggagcttccttgagcagtgggcccaggcctggccctccacacttcattctctgacctttctctctcctcatttcggtgcatgtcctttctgcagctgcctttcagcacaggtggttccactgggggcagctaacgctgagtgacaaggatgggaagccacaggtgcattttactcaagtcttctctagtcaatgaggggcacccagtgcttctagggcaggctgggtggtggtcccctaggtatcagcctctcttactgtactctccgggaatgttaacctttctattttcagcctgtgccacctgtctaggcaagctggcttccccattggcccctgtgggtccacagcagcgtggctgccccccagggccaccgcttctttcttgatcctctttccttaacagtgacttgggcttgagtctggcaaggaaccttgcttttagcttcaccaccaaggagagaggttgacatgacctccccgccccctcaccaaggctgggaacagaggggatgtggtgagagccaggttcctctggccctctccagggtgttttccactagtcactactgtcttctccttgtagctaatcaatcaatattcttcccttgcctgtgggcagtggagagtgctgctgggtgtacgctgcacctgcccactgagttggggaaagaggataatcagtgagcactgttctgctcagagctcctgatctaccccaccccctaggatccaggactgggtcaaagctgcatgaaaccaggccctggcagcaacctgggaatggctggaggtgggagagaacctgacttctctttccctctccctcctccaacattactggaactctatcctgttaggatcttctgagcttgtttccctgctgggtgggacagaggacaaaggagaagggagggtctagaagaggcagcccttctttgtcctctggggtaaatgagcttgacctagagtaaatggagagaccaaaagcctctgatttttaatttccataaaatgttagaagtatatatatacatatatatatttctttaaatttttgagtctttgatatgtctaaaaatccattccctctgccctgaagcctgagtgagacacatgaagaaaactgtgtttcatttaaagatgttaattaaatgattgaaacttggctgtggctactgcttcttaatgtgggggggacagggcagtggtctgggcccacatttagaagggaaaatgttttgcctgctgcacacattggacccaagtatgggcctcttctgcctagtactgccaaagggactgttaaggtgtcttgtccatcttctaccccccaccccccattacagggtaaaggaaccccagactaggtgaggggccagcagctgcctcacacttgtgttctctcctgagatggtccagctcacatccagacacccttgttcagacattttatttgaatttatgacagtgatggggatttgactgagatgccttatggagaagtaccccaccctctatgaagacagaatcactctctgccattcattctgcctgatgctaacaacacgcagctgatttagggagtgtcccagcctagctggatcaagggaaattccaggagccctggggcaggccctggcccccagtgccaagcctcagagtaagcagacattgggaaagttgccaaccacttggtagaccactaggttctctgttttcccttccctttccttttcaaatcccacagtttcctgttggggagaagctgtaattagcctagtccaggtaccagatcccagctaggggcgcagctgcttggataactccaagaaaacctgggcaccagtatttttccaattataaggactgtggcataaatttttaaatgagttatattgaaaccagatttctccagctgccaagggaagaaggtagggctggactccctgctgtggcccagcccttgttaggggttggtctctcactgcagccagacaggatgatcctgggttctggggagggtaagctgccccttgccgagttctgcaccgaataaagagtccaaacccgctgcttccgtgtcctgagagatgggtaaatgggtgatggatggagcagactgaagagacagcagatgactcagtggtggaagaaggggggaagatgctgggctggctagctaatgttcccccctttcagcgatttacaggaaatggagcccagcttggtcatgaagttggtttgcttccactgtgcgatgcactcctcagaaattttgaagtcagcctggacaagacagataagagagattttaatgatggtggtgggactgcaagaaaacccccccttttttggagggggggcagagttttgctcttgttgcccaggctggagtgcaatggcgtgatcttggctcaccgcaacctctgcctcccaggttcaagcgattctcctgcctgagccttccgagtagctgggactacaggcatgcaccaccacgcccgactaattttgtacttttagtagacacggggtttctccatgttggtcaggctggtcttgaactcctgacctcaagtgatccgcctgcctcggcctcccaaagtgttgggattacaggcgtgagccactgcgcccagcctgaaaactctcttatataccagta

SEQ ID NO: 303 - DNA, 57314 bp, Homo sapiens
  source 1..57314: mol_type = genomic DNA
ccccagtggccggtctctgggtcttgcccacacaccctgcccagtctgcagctggccatgcccaggtgtcacttcctgcagttcacagtgggctcttctgtcccactgtcaggcaggatcctatgcaaaatatggacctgtggggagcgagggtggggcggggagtggcatgggtgatgccgggtcagccagccaaaaacaactgtccgcaagaagccaccctgctcctggggcaggaggctctgtgcctgccagcggggctggcatgtcagggcaactctgcccacttgtgtctccctccatggctcagggtccctctctcactcaccaaggcctttctgtttgaggaccagaagcctctctagaggaaaccttccccaggaagcttcaccctcccacccacggtgacttctgcctcctacagactccaggaattccctggccagagcacctgtcacatccataagtctggacaaacagcaggggacctgcgcaggctgaggaagcaatttggttttatatttgggaaacaaagcaaagagaaaccctattatattcctgatacaaatatcaggaagttaagctttttaatcagttgtggctggtgatgaagatgtggattctccccgaggggcctctctgcccaggggatgggccggaatctccaggagttggtgaaacaattcatggttatcaaaagggaatatgggttcttaaagactgaaaagcactgatctaggacaaaaatcatggtgaggcacagtgactcacgcttgtaatcccagcactttgggagactgagatgggaggtaaggcttaagcccaggagttcgagaccagcctgggaaacatagtgagatcccatctctatttaaaaagaaaagaaaagacctttgtagagctcttttcttgtatgatctttttatagtcttgccttctttccataagtggcaagggaccgagatgcgtttggcgtgcaccacgcacagcgtagtccaggccctagagaggtacgtgttacgttagcaaaaggcaaaggctgctgtggttggggaggtctagatgcagatcctggctctgtccttactagctgtgatcctgggaaagtcacatccatcccgagacctttctcatttcataaaatgagaatgtcacctgtcacacagggcagtgaagacacaatgaaaaatgctctgaacagtgcctaggatatagcagttggtccacaaatgctgctgcccactcttccagcaactgcacctgcctctggagacaacatatggagtctggaggagaatgtgacgctctcaaagctctctgctttctaactggtgaagccccaaactcacagctcaggaagttctcatcaggctgggcccagccccagaggcctgctgcacccattcacccacccacccaccaccaccaccaactccctctccaaaggccccagccaaaagtcagcagccccctggaaggggacaggggacacctccacagacattggtcattcaggttttatttatgacaacttcttagaacacacacatccaatctaggaacagaaatgtacaacatggggcttaaataactttcatacactatgtacagccatcggcagaggtacaaaacatatatacaccttgtgctagtcacatcatggaggacagcaggagcctaatgaagcctgcagcctgggcaggacatgattgctagaaaagagttggtgggcagggcagggccctgattcatctcaggggtcttctctgatcctcggctctttgtggaggagtttctatttcctacttccctgcaaggccctcaggacatggttcacaggactgaactagagtgtgataggggcttcaagatcatgagtgctggggatggggcaggggacagaacaaaggtatcaaagaagaaacagaactttccctgcaaaatctgtccttgcacacaagagggcagggaaggatctgggagtcaggagaggagggccaggcccaggaaggcctgtggggcattggccactgaccaggaggctatgccaagcaaggagagcagcaagcagttgcctgtttgggatggcaaagggacacataccacaggtccgggacacacagtgggaagaaagtcactgctcctgcagggcaggctctgcccacacaaacacgatggtgaacagaccaggcacaggcaacaaccaggggatatgcctgctcccagcccagaccacatcgggggatgccccccagagctgagagctagcagggcaaagaagtgttatgttccctaacgtcactgcagccacctgctggtgtctccctccaccacatcaggcacatgagaaagtccccgcaaccttgtgttttccccatgtggttttgtgctttaaactgccctctgcccaggccacacatccccagacaggcagcagggctggacagctgagggtgaagagattcctaggctgaatccagggtgaggccactcccagacccaccgctgtcccttcccaaggggctgaaggtggcactctgaccacctcaaaggcttgggtgtgccaggctccgcctgttaatctttcctccttccttggaaatctcgcaaggcaactccatgcgctgcctttgagagttctggctgcttcagaagagtccgccactcacgtgaaagcaaatactgaactgactgatagtgaggacagggccctggcacaggactatgctgaagaggcccaagggcagtggggatggaagactccttctatccagggaacccgctcataagcttcgaaagcacaaagtggggcttgacccaggagactgggaatcagtccaagctcttcaggctcactagggctaggactcagcctgaactcaggcgtttagagatttggggtgcggggtttagagagcgctttactcctggtcccatggcgtaaagatgtggctgggcctgacaaggctcagcctccagtcttaagatgggcacagaagggcaagaagtaagatgacgagtcccagaattaggacaagccatgagccaaggcctggtctgagcaagggcagccccctgtcccagacacaggcacccccaatctcactttggacagagccaacgtggggggatcctcccgggcctgggcctgtcaagtctgcctgcgggaccctgccattgtgctcaaatcacaaccattttgtgcttccaacatttagggtgcttgtgcagtgagtggagctgggggcctgccccctaacatggaccttggacatccctgaaagagtgggcagagaatccaactctcatgaagcacaactcggggtgtctcatggatgttgggctcagggctcctgaaggacttcaagtttagagagtcaatgacacttgccaggacagcagagctggccccgccgtgaggtagctgacccatcagaaacagcagaaaatgggcatgatgatgagcacctctcgcagggccataagatcacacttcgtgcaagaacacgccttgcagctacagtgcagtcaccccaggtggggcatccccggcccgggggtgggagctcaaggggacagagtcttacgtgtttctatcgcttgtaaacagtcatgcggacggattctttcttacaggttgcaaggtcaaaactttctgttcaggttggcggggaggagtgggaagagatttgtggccacatcttagagctaagggggttgcccggcacccccggggtggccagaggaagaaggatttccagccattgctgacagactgttcaggtcccaggagaccagcatccaagggggtctccttcctgctatcagctgccccagacttcaataccacatccagcagggccagcaccagcaggacagccgtcttagcctctgtggcagctccgaggagggcacggggaagggaccaggcctcactcagcctccactggagcctgcctccccccaacactgggcgccacatggagagggctccaagtgccccagcccaagacggagaggagccaagggcagaaacacagaaccacctctggaaagtccaaaagtcactgcgtcctctgaagggaggtggggctggctcttggctcccagactgaagcgggaagcacaagaccagcgatgcaacggaaaaacagggtgggcaactttgggtgggggtggggcgggggagagggatggagctcagtcccccccaaggcccactcctgtaattccagagttcccccaacagggggcgccagaacactgatttaacaatttccccggagctccgcgtccccagccccggggcagagaaactctgccaactccctcttccttgataattttctgcaagggagggcctgcgctccatgccagttttaaggccgaaaatgtgtctcctgaataaccagagagagagaagctggagagactccccggcccagtgggggactgcagggctggggaggggcgggggtcagggtgccgggctgtcctccccatccaagccacctcccagcagacacagcccccatgctgcttcctacgtggcccacgcaggactgtggggcagaaccccggggcctgggctgtggggtgagcgcccccgccttcccgggggcgctgggcacaagacctcgcgagtgagaagacacatgtggtgccgcgggcatggctggtgtaaggctgcccggcacgggtgccaggccccggaacggaggaaggcactgagcgtcaggcggcctagaggccaggggtagctagaagactccctgggggctgtgtcggggacaggcctgagctgcagagtcgaaggagcagttccctcctctgcaaagcaaacagaggaggcggccctggagggccggggcagcggactccctttgggatttctggcccccaagagctgagggaaagaatataggggaagaaacttcaagtccgtttccaggaggcaacagcaaaaaataaaaataacaaaataataaataactgaagtatttctgaccatctccccaaaggaatctttctagcagctccaccttggccccatccaaaagggaccccagggaactgttggggccagttggggctatctgcgggttgccagagggttaagggttagctgcaaggcccagccgcccacacctggtttccttagctacctgaggacttatctttttgggctcagaggcaggtgcagtggctctagaggctgggctgggagaagcggggaggccagctcctcggaagggtgggatggggccaggctgctgcacctccccacagggctccaccactgggccaaaggcctgagaaaggggcagagccggttcagcaggagacaatgtggccacgactgccaggaggggaacaagaagggataatgccctttggcttcacagcttaatttcctccccagcctctctctcacccagaggctcctgagaggcaggggagggatgagggaacagtgtcctgtgggaaggccaagggagagggaggagggcaggagagggggccacgccctctgtccccagagcagctggccccatcggccgggtcacagcttcccttccatggtgtccaggctgctggggtcgagggtccgggggcatccctctgacctcactcctagggtgggccgctgtggggtaaccgccggacactccagaacttcaccgtcaggtcactggggtggaggacaaagtggaggggtgccggtcagctcttgcagtgggcttggctggctgcccccaaaagtagaggatgaactggattccccaaactccccaaatgtggttggggctgggaggcaagcatggcttacggggaggtggactgcaggtggtggggtgctgggcagatggagaggcctgtgcactcagaggcccccaggggagctttgtcatgggttttctttttttgggggggtgtttcgttttgtccaggcctgaaggctcccccttctgctccctggcacccatctcctggggcctgtcccactgttcatgcttggaaaaggacggtgggtgcaggagggacaggcagggcacctctctaggccaggcaggacaggaagggaaaggaagaagaaggagtaaaataatctcataccgttaagaagcagctcagatcgaagtggggaaagagagggaaaaggaaagaggggaagaatgaaagaggagacagggagagttggggagggtcagggcagggtggtggcgcggccctttatggccaggactcggcgaggaaggcagggggtgagtccagggacgtaattccacaactttacccggcagtcactgtgtggggagagaggcgaggacagagaggagaggtgggaggagatgggaaggggaggggagagaagggacaaagtcggaacaagaaagaaagccatctgagtcgcaccccatgggacagagggcctggctgctccccacacagggggccagagcgggtgggtggggtgtaagaggcgtggtctggggctggcagggctgctctgtgctctgagagatacctgcacgggggaagacagccagggcaggggagggtaggaagggcttggagacaagcgggcgaggcttggcccagggcccagtaccttcctcctcccctgcctagcgcagtgcccagcacatggtgggcactcactgaaggctggcacaggctaggtatgcaaaggaggccaccatggaatctgctctgtgaaccgagcctgcggggacaactgcagggccctgagcctcccagcctcccctgcccacaccaggaaggagatgagggagcagaggcagacctctctgaccagcacccacctggaggctgtgaagatatgcttggcattggtgcagatggcattgatgggactgtcgtggcccttgatctcaccgatgggtgtgaagttgtccacgttccagaccttgatgacacccgcacggcaggcgctgagcagcatggggcggcccgggatgaaggccagggcgcacacccagtccttgtgcgcattggggatttgctgtgagaggatcagggctggtgagggctgggggaggtgatgagggagagaacctgccccagggcccctcttgctagtagtggagctacttccaggctcccctggcctctagagctgccacacgggcgggtgacactggttccaggagccatgctggggtggcctgtgctgtgggctttaggggaccagagatgggtccctctgctctacttcccaggttcaagcctaagatcctgccctggcagagaacccttcagccctcacacgggtcaggctaaaacacaaatgctcccaggaaaggaattgggtaactgagcttcacatgcaaacccaagagctgagagcaaaggctttgctgagagcaggttgcctaagagggagatgtggcatcaggagaggccgcgggtagggaagaagggaggatggagacagaggaggaagagggagaacaggagggcttggggagctgtgaaaaccatctggcctggggcccgcgagtccaggtcccagggtctccaaggccctgcgtgggctatggaaaccaccctacccgagtctaccctctccctttcctcctgaccccacctggatgagctcctgctggtctaggtcccacttcttgatgccgttatctcgggagccactgaacaggatgtctccctggatggcgagacactcgatgccatcgtagtgcgggggctcgaagttgtgagtggggccgatggtgcccgtcacacactcgcccagctcgaacatctgtgggaggaggggccagtagggagaggccaagtgggaggatggaaggcagggcctacagcactgtggacccagaggcctgaagacccaggagtctggctagggtgacagccactgccctctggggagaggagcttcccagcaggcgagggttcctggaggtggggctgctccttctaagggactgggaacacggaaggttcagatcttgacccttcctgtggatactggggcaggggtgggaggagaccaactcaagtaatgcaggggtgaatcagctcatcacgccgagaccccacagctcaacaggcagctgctaaggagaagggtgggtttagggtgtgagcctccctctagaattcttttgatttttactaaatattcaccataatcccaccacccctgaaaaccctacttctttccagtttcttttttgttggagactgagtctcactctgttgcccaggctggagtgccgtggtgcaaactcggctcactgcaacctctgcctcccgggttcaagcgattctcctccctcaacctcccaagtagctgggactacaggcgcccgacaccatgcctggttaatgttttgtatttttagtagagacagagtttcaccatgttggccaggctggtctcaaactcctgacctcaagtgatcctcccacctcagcctcccaaagtgctaggattacagatgtcagccaccacgcctggcctgcttcctttcagtttctgactgtgtatggacagttttcaatggcataatcagagagcaaacaaattagtgtttgtatacttcatgtttggtttgctatttatcattttaatagctgcaatgcatcccatttagtggattttccataatttgattgttattctacccttcaacatttaagttattatgaatttttcaccagttacaaaataatgctgcaatctataactttctgcacataaattcttgccttctttggggtgatttcttcagcagacatccccagaagtcttataatttttcatgggtactcccagggcaacagagggcaaagattggggagagtggaagaccagccccgacccaggcctcatagctgaggtaccttaacgtagtggtccttggagccagtcaccacgaggtcatgctggctggccgtctgggtgaccgtcaggcacatcacagggccgatgtggccagtcagcttgccgacaggctggaacctgcagtgggaagaggcccagccaggggtaggtgaattagaggggaccctgggttggggtggggtgtctgccccaaaacaaataggcctggtcagggtactcaccctcccctctcgctcaaggcaagatcaagaatctagacatgagctaccctgcatcccagcagtctcactggagagggcacaggcccagcagcatggggggaataaaggtgttgctgaggtcctacccaccctggggtgggtccccctgaaccaagacctggggaccttgcctgggaatgccaaaccctcctccctccccaggtatcacgctgacctgctaagctcccagatgcggacggcattgcccgaggcggcgtacagcatggtgcccgaagggctgagggcgatctggttgatctgatgctcgccctgagcactggtgatggcacgggtggatgtggcggcacaggcatcccctgagatcacctggcccgaggacctgcccatcggagaaaggcaaggccagaggtcaaaacaatccatgtgcacagtgcaggaaaccaataaaacgtcactaagaccagcccaaataacctacttcttccaggaagtcttccttgactgacagagaagagcaatagcttctcccataagtgagacccaggggagagctccactctagtcccctatgagtcaactccccatgtggcctgcccatgtgcctggtcactggcttggaaagatggtaaggctcagtcatgagagtgggtgtgaacatggatcttccggaaatcaacctctctgagtctcggtttcctcatctgttaaaagaggtgattatatccattctgtttactatttttttttttttttctgaatggagtttcgctcttgttgcccaggctggagcgcaatggcatgatctcggctcactgcaacctctgcctcccgggttcaagcgattctcctgcctcaccctcccgagtagctgggattataggcatgcgccaccatcccaagctgattttgtatttttagtagagacggggtttcttcatattggtcgggctggtctcgaactcccgacctcaggtgatttgcctgcctcagcctcccaaagtgctgggattacaggcgtgagccactgcacccagcctgtttacatttatttatgtttgtttgtttgtttgagatggagtttcactcttgttgcccaggctggagtgcaatggtgtgatctcggctcactgcaatctctgcctcccaggttcaagcaattctcctgcctcagcctcctgagtagctgggattacaggcatgcgccaccatgcctggctaattttgtatttttagtagagacggggtttcatcatgttggttaggctggtcttgaactaccgacctcaggtgatctgcccgcctcggcctcacaaagtgctgcgattacaggtgtgagccactgcgcccagccttgtttactttttttttttaagactttatttttttttttaaggccagttttaggctcacaagaaaactaagcacaagatagagatttctcacatgcccctgctcccacacaggcacagtctcccccattatcaacaccccccaccagaaagctgcctgtgtttcgattatgaacccatgttgacatattgttattgcccaagtccatagtttatgttagagttcactcttggtgttgcacattctaagggtttgaacaaatgtataatggcatgcatctaccattacagcatcatacagaataattttactgccctaaaaaccctctgtttactttattcattattattattttttgaaacagggtcttgctctgtcacccagattggagtgcagtggcacaaacatggctcactacagtctcgacctcctgggctcaagcaaccctcccacctcagcctcctgagtagctgggactacaggcatgcaccaccatgctcagctaactaaaaattttttttttgtagagacagggtctccctgtgttgcccaggctggtcttgaactcctggtctcaagtgatcctcctgcttcagcctccaaaatacctaggattataggcatgagccactgtgcccagcctgtttacttcttaaggatcaaattaatagactgtagcttacagtgttaatgtaaggatgtagcatgacttctgctaaaaaaaaccactttattttgcaaggctcttggtctcagttctgcctcccctgccctatgcctgtgtgtctgagactgtcggggcagggctcagggccatgactgggtggtcgcctacacaggcagtggccagcatggctttggaggctcaccctgtttcctagctcctctttcagactcataggatgatatctaacacacctcaaggggcagggcttgggggactgggctgtgggtggaggccaggcaggccaaaaattcctctagtggtgctgccccagacactgtctcccaaaccaagagatctcaccttgtaccccagggtcaagccaagttcataggctggtaatggtctctgtgcccatgtagccgggctgtgctgtgctgagtgggtcacttgggctgggagcatctgtacccaacacagcctgctgcagccgaccactgtgaggcaggcgggggttactcacgtgagagtccgaatgcacttggctgagtcccggatgtcccacaccttgatgtaggaggtggacacggagaacacaagccccgagtggctgcagtacttgatggagaccacgttgttggggtggccctttagagctgcgatctcctgtcccgtaaccaagttccacatcttgcagcttcggtctgtgagagatgggaggaagccacagggaggggagggatgtcagccactagggggcgcagctccacctctgcaggggctgcccaggataggggaaagggatccacagggctccagaggacggagctccaggtctgaagaggaaaaaaacacatacacatgtgctcactggcatgtgtgtgctagtaaaaaactcagggaagagagaattccctcagaacttcagaccagggttcctcaagcaaactttccactaacaccagagttttgtgagccatactgctaaggtgtccagggctaaaataaaattcttaagcttttatggtgcctgttcctccaaacactaattgctgacaaagcaaatgaaccagtgcaagcaaatgttatgggaaaacttggaatcaatcaatcacacctagattgacagctatccccctactgccgtggagagctatatttatgcttgtgttatagtatgcgtgtctattacagactagttctttctgtcggtaaaatgaatgaatgaaagagtaaataaagaattttgtatttgcttattgagatagggtcttgctctgttgcccaggctggagtgtaattgcacaaacacagctcactgcagccttgacctcccggactcaaacgatcctcccacctcagcctcctgagtagctggggctacaggcacatgtcattgtgactaattttttattttttgtagagacaggatctcactatttgcccacgcaggtagtctcaaactcctgggcttaagcaattctcttgcctcatgcttccaaagtgctgcaattacaggtatgagccactgtgcccagcctatctgctggtaaaatgtttgactttgttgctgtaatcaggtgagcgtgactttgtaaagtgctgctgctgagatcatagggagtgcctagatgtatgagctggggtgatgttgggcagtgcaagtacaggtggggcacccaagaagcttcctgaagtttccctggaaggtctggaaggaagtgctggatggagccaccaggtcaggtatgagggaaggcttggccaaggatgcatgggatgggggccttgagccaaggtaagaaacaagggtagtaagcaaatagaccccatatcctcaactcctgggggctctatgttcttttctccttcacagaccactctgacaaaggaagcaggggtgagtaggagaccccaaccctacctggctagttggcgttccacatacctttggaccctgtgaatagcaactcatctgtggcatccaggcagaggatgggcttggtgtggccttcggccatggagacacactgcagtggggccgtccgtgcacccttggctcctccaaccggggagatgatgccccttcccgggagagagggagagaaggcatgctcgtcagccagggagactgtggccaggctgatcaaggcacgtgtgtgggatggggacagggcagggaggggatgaggaccaaataacagagactttaaggactccagccaaattccaccaaggtctgagagccgggaacgggctacacagagtggagatagcctgtcttaatcagcaatcatcagttgccatcctgagcacttctggggaagcaaacccggtgttaggcacagctagaaggtgcaggaggtgtgggctctgtccacagagagttcctatctgacaatgtctgacccagatcctgagatgtgaatgcgcccgggtccagctgggcagggcagaggcccaggggctggaactgggccctgtagcttccaccagaagctgcatgctgcttcagttaaccgagtgtgagggaggggtgctgagagggagggttgctcaggccatcacccccatgcaccctgatcccagtaaacccttctgctggtaactgcctctgaggctagcatcttccaagcagagagccatgtgtacacatacacactccttttggaccagcggggtcaaacttgtgactggcatttacgaagggctaaatccctttggggctggcttggctttgggtaggaggtttggggctctctggaatggggctgtatggacctggaacaacacctcctcgctcccatgatgctaggggagcgagaaggaggctggcccaagtgagcgtgagggttttgccacatccagcttcctgaggttctgaagatgatttttttctcagtgagggtcttttgggatgagaccctggctgagtcatgtctgaaaatatatcctagctttgtttcttttcccaagagaaagctgctcctgacagtgactctggccaagggtctactgaaatgatcaaggttttgcctgtggcgcttctggcacagctccccccagactctgccaggcccacccttgaggatggtggtcggatacgtccagctgccagccaggtgccacacatgcacaaatagctccccaagctgctccagcaccctgcttctgacaatggtttggcttcactgcatggccacagaactatgtcaaagggatcatgctccccccgatgacagcctggccagctggctaacatcttgtggtggcaaagcctcatgattcacagtaaaccagttgtcgacactcagggctggaggctcgaggagctgagacagcccaccaggagagccgaggaagctctcagcccacgaggggcccttggcttgtcaggggctcgggaccccaggtcctgagtcttgctcctcgttgtgcggtgtcatgctcggctggctgggagaaccagcctccagccatcccacaggctgcgggaaggggaggtacccacacatctgtgtgctaacaggtgtgggcaaggggcgctgcccccatggtgcccctccccccatggtgcccctcccagagccaacgtctgaaaagctcacccccagcacaagctgagggaatcaaaggacccagagcacaccaccggcacccccaaaaggagcagccttcagcatttcccctgccttccagtcgtggagaactcagccccagcccagcatcccctaggcctccatgctgcgcccctccctgcccaggtgaggagggagaagagaacagggcctgcgacaagcaactgtgcaccctccccaagcccccagctctagctggcgcagtccaaggccttgtggccaccctgagagagaggaaccatgggggcaggaacaggtctggagaggggggcagcaggaaggggagtggaggggccgcatgctgaggacacgggtgtcaggcgggagggatgcagcaagagacagagaagagagggtgccgagagtgagagtggggaaccaaacacgagagacattctgtgtgtacctcaggacctccgacaaagaggagtcgctgtcatcagacctggggagggcagaaaattagctggattagggggtgagaggagacacacacagagggacgcagaggcggcagcagtgtgtggggtggtcagagggcaggttattctcttccagcggagcagagacaggcagaggaatgagggcctcgggagagcaggggaggaggtgggtgggctggtctgggagctgggactctcccccaggagtgggctgccagggtctctcggctggcaagggaggagcgaggagggggccacggggagatgtgggagcaccagccccacacatggggagacgtttccagggctgtttgctggttccaagctctctggctgccccatcgcacaagctgggggcacctgccccaccccagcaatgctcatacctgcccaaggctgaaggaagccatgcctgatcctacccctccctgggagctggcttcttccagcaattcctcaggggctcacttatttacaaagcccactatccctagggggcccactgggacagtgcctagaagttggctgtgcaccatgcacaggctccaagacctggaccattggacaagaccaaggcctccagaagaccatcaggctgggatgggcacagccctgccccaatccttccaaaaaggggacctgttgattgtaacaacatggagatgggctaggagtgatccatggctccccccacagcagcctgagccaagataggtttggggaaggaggtgtctggggtgccaggtctgcagggctctgactcctgggctcagcattcatcaagtagtattttgacccaggaaggggcatttctgtggagaggtggggagggtggacatcaggcactaggtacaaggacaagtattttctagtgtgagactcccctgaaggccacagcactgtcacccctggggcagggaagccttcagggagctaagagaggagccctcttgagggctgcagagagcaaaacaggaccagggtgggcccagcaatgctggggagcccagagcagcacatggaggatagggtcctcccctttcctgaggcacagcaggcaggggctggaagtcccaggctctgggtgcaattctgccactttctaggtgaacatccctggctccctctttgagcctcatttcctcttatgtgaaatagggaagacaattctcgtggttgtttcatagcctaatgaaatcacatatatgaaagcaggttgtaaagcacagggagaaagcctgaatgcaggggaggctgttaacataaaccacaccattaggcagtagagtcttgcatcaggagctgtgaatataggtggacctgaacctgcctgaggaaggcaatttgggggtctggtctctttctgctgggagaatgcacagagagtggagtggttgaagctgaaggaaggggcttcagagcagactcaaagcagcagcagaggtggattaaagggcagctctggagagccctcaggcaccggccccatgcgaccagcccacctgactgcccggccccaatccctgtggcctccttcttgccctctcctgaggtcctggcattctcaggggaggagaagggcccatggttagtacaggaaggagagaaatgccaggagagggcatcagggcctcagctcttggaggggctggaacttcaggctggggttggcttggccacctgagccctcctccagcaaggaccatccacaggctccccattgccacctcagtgccctcccccacttgccctccagccctgcttacttgtccagcgctgacccctggctctgattactggtgagacgagagaagacattgcggtcattgcggggccgagtgggaggggatgatgggggtgtgaatcccacatctgtggacctggtgagtcgggacagagggcagcctgttagtgaccacccctgcccacaggcccctacttggtgctgggcttccaccttctgccttgtgaggcccgcaggacagggtctgctgtgcagtattctcagagctcaacacccaatgaaactcctggatgctgtctttaaacatcaatcctcatcattcacagattccatatttgggaattcacctatttattaaaatgtatttgtggccaggtgcagtggctcacatctgtaatctcagtaaattgaaaggccgaggtgggaggattgcttgaacttaggagtttgagaccagcctgggcaacgtggtgaggcctcaactctacaaaaagtaaaaaaattaggcgggcatggtggtgcatgcctgtagtcccagctacttgagagtctaaggtgggaggatcgcttgagcctgggaggtggagattgcagtgaaccctgattgtgccactatactccagcctgggtgatgaagtaagaccctatctctaaaaagaaaaaaatcctcctgcctcccagcaaggcaggtggcaagaggccatcttgagcccctgctttcccactatttagctgtgtgccaccaaacctcttaattaagtgcatggaccagaaaaccctgaaagtcatccttcgatctacagaagctctgtgggcctggcccacatgtgggtgaccagctggggacttccctgccattctgcattgatctcttttttcctttgaatttctttcttctttcttttccttccttccttccttttccctcccccactcccctccccttccccctcccctcccctcccctcccctcccttcctttcccttcccttccctttttttttttttccttttcttttctttctgagacagtgagtctcacactgtcacccaggctggactgcaatggcgtgatctcggcccactgcaatctccacctcccaggttcatgcaattctcctgcctcagcctcccaagtaactgggattacaggtgcacaccaccacgcccagccaatttttttgtatttcagtagagactgggtttcactgtattgcccaggctggtcttgaactcctgagctcagacaatccacctgcctcagcctcccaaagtgctaggattactggcgcccggcctttcctttaaatttctaatcttctctcacaccataaggccttaaaaagacctgaaagctccccagaacctatggtcatgaaaaggggctgaagcacatcagtgcaatgactaatccaagccactacaaagccacttgtgttgggtgcacatcagcaaacagtttccagcatctggctcggctatgcagtttaaggtgcgttacagaaattacatttccttttttttttcttttttttttttgagacagagtctctctctgttacccaggctgcagcgtagtggcacgatctcagctcactgcaatctctgcctcccaggttcgaaccattctaatgcctcagcctcccgagtagctgggaatacaggcatgtgccactatgcctggctaatttttatatttttagtagagatgatgtttcaccatattggccaggctggtctcaaactcctgggctcaagtgatctggccatctcagcctcccaaagtgctgggattacaggtgtgagccatcacgcctggcccatttcttcagtccacacctgacagggtggggaagggaccactgggtgaacctgaatggctcagtcaagctggcccaggttacactgtgtacaagatgatcaacagagcagaacatcatagccactcatgtaaccaagaactagactggtggtgactctggagcagattctagaacatgatctcacctaatgggctgccctcggtcgtaggacttccttctcgtcagcggggacgtctctgtggctcgagattgcctagggctacaacagaagagtccagtgaggcccagacccaactccacctccactccaacccacattcctgctcccatccttacaaagtgctgccccgggtaggcagactgacggtgcgcgagaccctgtcccggtaataggggtctcggacagagaagcccactccgtcctctttgatctcaacgagggaggccagggacttggtgatgttcttggtggagatatccagtggggggcccaggcactcagccgacacagctttcatttgggcagacagtttgggctcgctctgggaaaagaagaacagggtggatcaacttgcccaaattgcatggcacataaaggggagccaggggaaattctatttttttttttttgagacagtggtgcaaacatggctcactgcagcctcaacttcctaggctcatgcgatcccctcacctcagcctcctcgagcagctgagactacaggcacgtgccaccatagccggataattaaaaattttttttctgtagagatagggtctcgccatgttgtccaggctggtcttgaactcctgggctcacaaaatcctcttgcctcagactcccaaagtgctgggattacaggcatgagccaccacacccagcccgcccggaaattctaacaagagaaatgatgccgtcttggcctaaggtagaggacctgatggaaggacccagacagacatcacctgtgctccacagctaaactcttatggtttctggagaatccagagcaactgaaatggtttcacggcccttagttggactatgtaaacacagaatgcccagcctgacttctttgctggtcaccagctaatcagtttacctcaaaactatgcataatttgctattcccagtctgaagctttttccctccttgtctccttaataaaccctgcatcttgcttcagtctaatgaaactgatccctcattattaggtaaacttccttatttttgactcccatatggttgaattgactgtgtgcacgtaagataaccagacatttagaggtaggttttgacttagagtgtgaggcagaatcatgggtgggggaaaggggatatttttgaaagcagggcccctggttatggtgctgttgctagcagggtggcaacagaggctagcggtggctccagccacttctcccaccttccacccacctcagaaggaatgggctgcaacaggttacatatctggacaacccccaattccagactaaattttcttggcacctccctcccagctggggacaacattgtgttgtggctgagggtggagcagagccacagtaagcggtgaacaggctgtgtggaggctggccctgctgcacccactgcctgacttccggcggggctcaccttgaacttgaaatcgtcatggctggtggagcctttcatggtgaatgactgggagaagctgaggaagaagcagagagagttcaggatcctgaggagcccccaaattcaggctcagccctgggacctatggcaactcctcccaccagccccaggtacatgctgtgagccagcctctcactcccagcttgcaaactcacctgccctcagagaactctgagatctcctcatctgtgctggcgtagccattctctgtgggagggcgggagggagggaaaggggttgagaagccctgtccaagtgtcgggggagggatgatggtctccctcctatatctcacccactggaatcagaccagggctcctggtgggggttaggggtggttctggggaagtgagggccttgtgggggtctgagcccaagagcactggaatgccaaggagctggcagcttccaaccgcccctacccgtaccctgctgcacattgtagatgagggcctgcagctcggggtgagcttcagccttctcacgcagggcgtccaggagcagatggttctgggaggagcctgccatatccgtctgcctcagtcggccctccaacagccggatctgggcttccttttgtgccacttgcagcccctgggggcagggaacaaagcctggagttacccctcctgggggttgggagtcacccatatcacacaacctgcacccctcaagacaccttggagtgctcctttccagctcccaacatcacccttgtacctggcacagacctgagagcaccgccagcccccttagctcccacatacacacattaagtgaaggtcaccttaggacataccctattatgggctaggttatgtccccccaaaactcatattcatctacagccaaggagagaggccccagaagaaaccagccctgccaacaccttgaccttggacttcctgccctctcttgtttgaggctcccagactggtacttggttatggcagccctagcaaactcataaagtccccagacacaaagcggagctgagaggagctcagtggggcccagaggaggggtcaggcggcagagtctcctgcctccttccagagttacacagatgcacaccatgtagggtctgtccccagagaccacaggccccaggagggaaggaggcacatcctctgcttagctctctgtcaaggagagagaagaggagcccaagaaatgtcgagggacacctgatgttctggtgtaaaccctcctgggtggaatgtggtctgtctgtagttcccctacccccacatacacacacttctccctccacctccagcagactcaagcctagcactgctttggataggcttgggccagacacccagagtcaactttaacagaggccctgttgtgtgccaggtgccaggccacgtcccttacacacagcatctcgttaaagccatgcaacaagctacaagcttggtatggtcgtcctctcagctttacagctgtggcatgggaggtgcagaggttaggcggcttgtcctagcctgtgagtgacgcaggtgaggaggcgccaggcccctgggcttcacactagggtatatcacagaggcatctgtgcccatagagccccctgcccatgtacgctcccagcttaccttgtcaatggatgccttgaggaagttgtctagcaggaggcgggcttcagccagggagcaggagctgatgaccacggatgtgtctgtggagtccagctcctcctaggaccgggaggcagagagccccgtcacctggggctacccctgccacccatctctcccgcctccgccccagcaggcccagccctgcggataccttggtctcctccagctgcacgatggtggcctggcagtcggtgatgccgtcattgatgtagtcaatgttggctgccagcacctcgatctcctcagccagctcctgcagccccttctcttcctcggggctctcagcctgcagccgctcccgcttcctccgcagtgcctcctgcaggaggaacagctcctcccttttctggggtcagaggggagggtggtgattgtgatgaaggagaggcctcaggtagctgccaagccctgcccatagcttccaccacaggctggcctgtgaggtccccccagcacctctggattccagagcaggcaaaaggagcagagggaagtggggcagggaaaggtctgaagagccagagaagttggaggtgtcagaggacaggcagaggggtggaatggaagagaagggggaggcagggctcaccttgatgagccgctccatgtcagcctccaggttgacaatggtcattctctgcatgacgatgtcaatgatccgtcgctccagggactgccacttgagccttgccgccttactgaagctctggctggcccccttcttctggaacttctttctgggagacataggcaaaggggattggatgggactccttttaacctctgcagctccactgagcccccatctggagctgacagccacggggacccggagcactccccagagcttccctcttcctcaccctggccctgccccatattcccaccccctctgcctgcacaggccaggggactgccagtccaccttaccgggcaggacgggtgccattgacagtgggcgcaggatggtcccccaagaagtggttgattttgcggttccactggcgcacgatgctggagacagagcgggcccctgattcagcctcagatgaggtagtgctggccgacacctcagccccagagtccagcatgggtggctttagtcctgcacgccctgccacccgctcagacatgggcttggccaggcgcctcagtgcagaaacctggggcagcagggagaaaagagggagccggtgagcagggtggcctggagccacacagaagggcccaggttggggtgccgggcagcaggaacacagaggctgctctgtgctggcctgggcttgggctgcaaaagggccaaggggtctctgtttgatgtgacatgcacacaaaagaggctgccaccttctttttttaacgcacagctcaggcatttgggaactggcctgcagtctgccctgcagcctgagctcttgttgagaaaggcccttctaataggttggacacaatttggacaccaaatatgcttgctgaatggaaggagggagagccagggccacaggcagggcttgcttcccctccctgccggctctggcagaactgggaaataccgcctttattccaccgccaggaagttggaggcccaaaagagaaggcaagcaatgcacacatgcacgcacacatgtgcagcagggccagggcctcgccagcccctcgagtgagctcacctcctgggtcttcctcctcaggaccatctcctgctgccgcttctgggactccagagctcggatctgaaactgtgggagacagaagagggctgggctccacactcaggcaccttagccctctctgtctgtgtacaggctggctagccctgtagttgaaagcctgggcttcagggtgattctcatgcagccaaactcttgataaagtgggacccagggttgagctcccctccccagaggttgcagtgaaaactgctttctccacaagggcaatttccttagcctcttcttccctccagtgaggaggaatcctggagcggagggctcagccctactggggcttctctgcagggcctgaagctgcacatttccagcttgctggtcaccttgggcaagttccttcccctctccagggctcaagtccctcctcttaacatgtgggggctggaccagaagccacagggtctcatcttgctctgacaggctgtactgtcctccaagcatgaccattaccacttaggacagtggagactgaggcccgcttggtcaggaggggcagccaggtgcaccaggaggctgggagtgctagggccaaaggctcctgggaggctcaagggccacccctcacctcctgtcgccgctgctccttcttgagctgtgcgatctcccggttcctcttggtctccactagccgccgccgctgttgctcctcacgcatctgcttcatcagggccacctgggatgggcagagattatggtggtgagacagggctgggaggcaggtggcccacactctccagggaggggccagctctgagggcatggggcagggatagtggctagccaggcaacactggctcagggcctgggggtctgaagtgaggggttctacctcccactcctccataggagcttaagccgcctgggcaagctgccaaaaggagtggcctcacagccagcccagcagtgcaggtgccccactctgcagggcccaactgtggcccttgctgcttggaatgccacagcccctggtggccctcacccacagccactgtcctgtgtctggccattccagaaacagtctgggttgctggaggcaggtaatcctctcccctgctgaaggctgagctgcagacagggctgaggtgaagatcagggccctcatggccaggctcacagtgacagcaataaaaaccaccattatttactgagacccagctgtatgccaggcaccctcctcatgacaatcatgagagaggcattatcgttcctgttttacaaacaaggaaatgagcctcagagagacaaaaggacttaaagtcataaaactagtaatggatggccatattccgaaaacaaatcatcgcctcccagtcagctcttcctgcagccccagggatggctccgtggtaggtcagcaaagctaaggaccaagcacagagaacctggaccccagagttgttggaaatgtagccaaaggcacagaaagcaccattagtgcggccggaggcgacccaatgtgctgggaagccactgacctcgggccctgcggcatctgcctccctattcctggtgcccagaacatagaagtgtaatgtacacagggctttggacaccttccaagtgacaggggcataaggaacacatgacagttgatccttcctctggtcaccttgggcaagttccttcccctctccagggctcaagtccctcctcttaacatgtgggggctggaccagaagcctcgaacatcaccaggaatgtcatcaacctgtcctgccctcaaaacagtcaagaaaggaaacaggccgagcgcggtggctcacacctgtaatcccagcactggcactttggaggctaaggtggaaggaatgcttgattctaggagttcaagatcagcctgggcaacatagtgagactctgtctccaacaaaaataatacaaaaactagcccggtgtggtggtgtgtgcccatagtcccacctactcaggaggctgaggtaggaggattacttaagcccaggaggttgaggctgcaatgagctgtgttagcgccactgcactccagccagggcaacagagcaagactctgcctttaaaacaaaacaaaacaaaaaaaaaaaaaaagagagagaaagaaaaacgaaatggcatgagggagtgggctaatggccagcagggtcagcttctttctgggagggtgggagggcaggcaggctctgttggggtgaatctgcagagaagaggagggattgcttgctgctggggctttggggtccagaatgagtgttctcccaaaggactggaagaacaagtcagaccctcggctaaaagtggacctgaaaactccagcatcccaggagctgtgtgcaaacccaaggtgtcaggtgtcttccggggtcaggggcttaaggcttcctggggaggtgctatgtcttcctggtcaaagactcatccacccgactttgcatgtgtagccaagcaccatggtggctaccacagaggcaaaggtctcagaacaggtgagcacattccaggcacatgacaagcggaaacatgccacggtacccgagaccagcatcacttcgcaggtttaaggtagaaggcattgtggcctctccctgggagaccccgtggctgcaggccccaccccagttccattctgtgaatcgctggggccctgtagctgaacagccatgggaggattctggggcactggctctcacagtgtctgatttgaatcctcggctgctgcaccttctgtccctccaacagaaaacctaggcccctcctgggatgacccaagggtgttcctctctgcttctagctctgggttcataagaacactgtcaatgtggacagagccaggcacgtggctgaaggagctcagcaatccagagactgaaacacaggtctacacatgagccttctgtcagatgcatcttggcgttacattatttgccaggcttcagagccatacaaggatcttccctcatgaggctctccagggcctccgcagctgagatgtgagctggccaggacacgatggggtaccctgcaatggcatcagctgggaactcccagggagacagagtggggacgcacataagcgcaccccagaagctgcaacagcatgtgcaggcccctgttgggagtgctgctccaccccagagataatgaaggcccaccagcccctccctctaaaccatcagtgggtgcaggggcccttgggtgatctgggtacttgagtccacacttgagtctcaacaccccacagggtgaacgcactgaaggagatggtgcaaacagggctccttggggccagcccaggccaagcaggtctgagcacagcaaggcagggacttctccactctagtcaggttgatgaagcctccggacctgcagcccaggcttgggcacagagcctgcccaggtgaggtggctgggcctcaatgacagctatgggtccaccacctcttctcagaatctacatcagccaccactgcattgcctctctcctctgcacattgagtcggctgtgagcatgtagctaccaatggctgctagatgccccatcagccccaggcactggggagctcccctttcctatgtctctgtccccaaggccagcccttcacagcttactggggctgccaccagtgcccagggcctagcccagggctgtggggatctgggctccactgagggctgaggatcagagcaggcaggaatgtaggacttggaaggtccaaggggagggaggactgaaagggagcatggatctgctgagccccagacaggagccagaacacaccagacactggaaacacaagacttgagccctgaagtcagaagcacaggggcaggccccaggccccagagactagagcactctgagtggtggcaaagtagaaaagggaggcattgtgccacctggaacacacagtggcttgggagccagagaactgagttcaaatcccagtgctacctcttggaagctggaattaacttctctgagcctcactttctcatacataaaagaataataatagacttctttcaagaggttcttctaaggactgaatgtgatcatgcgtgtgagatgactagcctggagcctggccatagtaaatgttcaaacgatggtaactgttactattatcactcagggccaggttgcaccaaatgagaggcctcatgtgcactttgcgcagacccgaagcgagtatgctgcagcctccccaacaggaggcagcaccaagtggggtcccctgaaatcctcacctgccctgaacacgacccctgtgcaccccagcatccccgcacactggccccactactgggcagggtgtttcaccttggacgatgcactcagctaagaggaccgtgtcaagggccaagacagggtcaaactaggttaatgctgtgtgttgagaagagaatccacacttgacagcaatgattatttttacgatggtgagtggattctaagaagatgtcacaggcactccaggccccactcctcacaccctcggcccctaccttggccttcttcatctcagccacctcggcctgtagcttcttcagctccctctcgtagcgcgactggttcttaagcagccgggcgtgctctttctgggcggcctgcagcttctgcaggtcccggttcatctcccgcagcctcttctcatagtctgccttgatcttgttggccttctcctcagtatagcactccatggtgcctgagagcaaggagacgcagctgtcggtgctgggtccctaagggctcccactaaatacagggtcatcaagggggaacgcaggaaccctctgttccagtctcattgtatgaccttgggcaagtcacacccctctctgagcctgtttcatcatttgaatgagggggtcagactagttgatgcccaaggccccttcctgctctgacatcctattgtaatgggcaggggtgttttcatcttaagatctctgaacccctggtccccaacttcccacgagggtcctgtaactcactcatgctggctgggttctgacccatgatccagtgttggaggaaagagctggggcctgtgggaaggggaagagtttgcaagagaagacagaatggtgtgggccagggcagaaggaataagctgattctccactcttggcctctcctaccagaactaccaacagacatctccaacttaacaggtacaaaacccaactcctcatttctacccctctcccatctcagtacacagcatcacgctccttccagaagctcacaccctgaggcatccttggctcccctctccctcacatctacctcccagcaagcaatcaacaaagccttctggctcaacctgaaaaacatatccagaatctgacttctcaccacctcctaagccacctctcctgggatctttagaacagtttcctaagtggtctccagcttccactttcactcccccatgcagcagccagagtagtcttttaaaaatgcttttaaatttggtatcacgtagctctcttgaaactccacacatcccgtctccctcagagtataaggcaatgtccttacaatgacatttcttctccgacctgtcccctctcactgtgctctaaccatcctggtccccttatcgttctgccaaaatgccaggcacatggcacccttatggccttggcatctcctgttccctctgtctgggacgctcttcccctggttggtgctgctctagcactatcaactccttcaagtctttgctcagtgaagtcttcacgaccatcctttaaaaaactccaattcggccaggcacggtggctcatgcctgtaatcccagcactttgggaggccaaggaaggcggatcacaaggtcaggagttcaagaccagcctggccaatatagtgaaaccctgtctctactaaaaatacaaaaattagccgggcgtggtggcgggcgcttgtagtcccagctactcaggaggctgaggcaggagaatcgattgaaccgggggtcagaggttgcagttagccgagatcacgccactgcactccagcctggacaacagagagagatttttgatttgttttgtctcaaaacaaaacaaaacaaaactccaactcactcttcagtagttcctgttccccttcctggctatacttatcaccatttgacacactatagtttctgctctttcgtttatgtttgtctttccccactagaatgtatgctgcacgagagcagggattctgtccactccaatatctctagcactagaacaatgtctgctctgtaagacatattcaacatgtgtttgctgaataagtaaatcaatgaatgaataaaaaatggaatgaatgggctgaagagcagcataatgaagatagaatgtaagaacggttacaaacaggtccaaaggaaaagacccaaggaactgagtgcaggaggaaaggctgggagtgtcatgttcgcgtgcctaggtatataaagaattctaatacatgacgtgatagcaaagaaaaaaaatcaatttacaatgtttcataggaactagggttagacgtaagaacctttaactgtgggtcaaaggaccacagtcaaaggttgggaagtcccttgcctagaaggccaggataaccccaacacaccagctgcttttgacagaggaggggctcagggaaaagggagggtccggatggggtggaggggcatggcggtggcctcactgaggttctgcagcacacggtcgcgctccagctgtgtgtctcggatcttgttctgcagcagaatcagcttttcctcatactggtgcttgagcgtctgcaaccgccgctggctgttctccagctcgtcgatcagcttctgcttgatttcgatctcacaagtcaggtcggccaggtccgcctggaagttcacctctatgggggcacaatcaggctcagcccagcgttagggcgaggggcaaattggggagcagatgtgccagtgctggggagctgggaccctcctttggtcagccatgaccaatcagtgaccagagactgggcaaaatgataaatcctaatgcaggtagaatgcggccagaaggaggaacacatttaaagagcagttccagaaaggcaaggtagggctcaggagctggcaggggggatctacacgtccttcccagccattcgaggccagcatccacctgttccagatgacatgggaccagcttcagtggaggagggtgagatggctgagagcaacttacagggctagggccagggctggcagcaggcagggctgaaggggcaggcatctccatttagaggagagggctttggcaccagtcaggcctacattcatgtttgctctgcatggaccacactggggaaggtcactaaacccctgtgagcttgttcctctgtggtgatatagggaagctcaccacccctatgcatacagttgcagtgaagactgaaagaacctagccgctcaaagggttaaggtaagcacagtgcctggcacctaatgaacgaccaggaagtgtttgccatcattctcatcatgactgcctgttgtcattggtttcacgtctgggagtgctggggcctggacaccattatctttgagcagggcccgaccccacacttgggcactggcagccaggcattgcatcccccacagcccacagctcaggcccacgcacccttctcctcggggtctgagtctgagtccaccaggctctcttcactgcccgagtcctcatcttcatcctcgcgcccttcctcctcctcacagccactctcgtctcgctcttcctcctcctgggcaccaggcaccattggggtgggcctggcctcagagaggggagcccagaagcagaggtgcatcccgacacaatgcctcaggtgtgtcaggagggtggggattggggcaggccacagctgagcccccctgcccaccccctactcctggaagagtgccgcctcccccaacaccaccgcagaacccctctaggagggcctccccacctgcatcatccgtttgggatgaggtggggtcctaggggatggagatcaccatggtaaccagtcagagatataaggaagtacaaggatcaactggatgcagacccaaccgcctccttcactccatacaaggatgcggatggggcccccgccaaccccagcagggacacaaggcatgcatgtggtgaggtggggcggcccgtgctcctcacctcctccgcctcgttctcatccgtctcctcgctgttctcctgttggagttttgccctctttttgaaggcttccttctcggggctgctcagggaggacagggaagctggattaggaaggctgcccctgccctgagcacatgggcaggacggcggcagcggcagaaaaggaaggctctcaccagaggccggggagagcactggctcctactctgcagagaaccccactgctcttccctagggccacccagagctgaccttggctcagctcagtccttcctctccttgggggaaagcagatggcataggagaacgtgggggagggaggttgcccaaaaggctgagcaaatctgcgccatgaattcccaagcaatactgaggcagcccctggggctgggggcgtggaggttccctcctaaacactggtgggcagcagtcctccttggggacgggcagggtccactggggcggtctgagggctctcaggggcggggacgacactccactcacctcttcctccgctgcctgacctccttcttctttagccgctccaggtcctgcttggccctgcggatcacctccgaggcatcctccatggagctggcagggctgcccccgaaggccggggcggctggagaagcacccagggagtaggggctcctagccgaggcccgtgagaggctgcggcgcagggactcgttcatggcttcactctctagaagcttagtcctgcacaggaagaacgagtggacggggccgagtgagctgccacagcccttggcgtcacctggccgaggcccccagcccgcgcacacctgccggagctcactcactcaccgtagctcctcgatctcccggatgtagttctggatcagcgcaccaatggcctcattgccatcgcctggagtgggacggcgggaagaagggtgcgataaagaagataaataggccagcgcggtggctcagacctataattccagcactttgggaggccaaggcgggcggatcacctgaggctgggagttcgagactagcctgaccaacatggagaaaccccgtctctactaaaaatacaaaattagccgggcgtggtggcgcatgcctctaatcccagctactcgggacgctgaggcaggagaatcgcttgaacctgggaggtggaggttgcggtgagccaagatcacaccattgcactccagcctgggcaacaagagcgaaactccgtctcagaaaaaaaaaaaaaaaaaagataaatagcagcaagggtcttcaacaccactgatactactgctcttatatctgtgcctctaatagggcagctcatatgggccttttccaaaaagaaatctatagaaaaaatactttgcacagaggtatacaagcactgttggcaatagcaagaaactggaaacaacctaaatgcccatcactagaaggctactataataaatttattcatcattgtcacatatgggacaccatggcagaagatgaagagaagtaggtttttttaaatttttattttttggttagagccaaggtcttgctctgtcgcccaggctagagtcacagctgactgcagcctcagcctcccgggctcaggcaatccttccatctcagcctcccaagtaacatgaactacaggcatgtgccaccacatctggctaatttttgtattttttgtagagactaggcgtccctatgttgcccaggctggtctcaaactcctgggttcaagtgattctcctgccgtggcctcccaaagtgctgggattacaggcgtgaaccagaagtaggtttaatatggaaagatttataaaacataatgctaaatgaaaaagggaagtcttagagcaatatatataatctcatacatagaaaaagtagtctatatcatacacacatttaagaatgtatatgaatacatattcatacttgaaacaaatactgagaaaggtgtgggaaaatacacaccaagctgctcatagaggttccttctgagaagtagagagggcttggggtggagggttcagggagaggcgattttaatctttcacttcatatagtgatgtattgtttgcatgttgaacaagaaggatgtgttcatgtattacttgtgccatacaaaaatgttttaaaatcaagtgaaaaaaaatgcataaatgagttgaactatgaattgactggctggcttagtccacctgatactctggggtggatgtcgggggagggagtcctagcccgttggtgctctgacctggcctggcacagcccaactcaccggccttggctagcagcaggttggcctcctggctcatgagctgggtgacgcggttgttgatggcatcgatggcctcctgcatggctttcacccgcagccgcagggccccattctccttctgtagcatggcattctctcggaacagatcactatagccctcagcgccatcctctcctatcactcgcttgccctgggagcaggggcaaaggggagcagtcaggcagcagagctcgcggttgggggggtaaggggctgatgatgcccctccctctgccagcgccctggccttcccctggatatggcgcatcaccagtctcccctgccccaggtttcctaaaacacagctactggcccccagtgatcaaaaaccttacacagttctccttgacaataaaaagtccaaattttgtaaccagccactgaaggcctctcacaatcttacttgacctaactttccacagtgtattttcatatctccataaagtctagtccaagggtcaaaaccctctctgccaggcagttggcataaatgagtcaggctggttgtaagacaatagggagtggtagagactggaactaagagagtcccagactcagtctagaaggggcagcccctatgcctctccagccaacttggtaccatgagttgttagatcttgaaaattttctagcaaaactgaaactccctgattttcagaaaggttgacaactacgttgtattcttttaaaacaagtgcaagccaaacctaaactcatccatgtgccagatttgggccatgggctaccaattggtgacttctgtcttagtcacatagaattagacatttaccccaaaggacccattttttcccactctgttcctttgtgcatggcttgttctttacctagaatggctgtcccatctcattttgctgttacctcattcattcttcaaaatccatataaaaggcccctttttccatgaggccctctctgaccatccatgcaagtaaggccaactctctcctctgcccctctgcagcacactggatactcctgtgggcccctctatcaacgattctgtgccagtctagcagtcttacctgttccaacacaacacattcagcagatatgaaaacaccctggagagtgtctgccctgtgcacaagatctatgcaacaaaagctggggagcccttctttcttggacttagtattctaaaatcttgagggctcagactatgcttgattcacatgggtgagtccctaatagtaagcagcatgcctggcacacaactgatgctcaagagtcatgtccaaagtggatgatggtaatagggaggtgggagggatgctgaggaagttagggtgaggctgcagggcagagggtgcatatggagcactagctccaaggggagtgctgggcaatgcccaggagcatgctcaccgccttatactccatcagctccatctgcagccgagcaatctcagcccgcagtgcactgatttgctggctggtcttgtcctggttcactaccaccttgttcttgatgttgcgggcccgattggcatatttgagtgtgttgagggtctccatgaaatctcggtctgaggggctcacacaggcgatcatgatggtctggctgggggtgcagaaaggctgttgtgagggtgagggacacagccagcccccagaagcattgcctcagggtagaggtcctgctcccatcccattcccccactaccttaatgcccaaagcacgtgggcattcaggacagaacctgggatgtggggagctggaccatctggccaggagttttcactgcaacagcaggtaaccatagtaaaggcagctaccaaggctggggaggtggtgatgcataattgccagagtcctttgcttggtgatgaggatgagttacagccctgcattttctagcatttcccatctatcatctcgtctgggtcatatgacttcccttagaatgtctctctctgttttactgataaggaaactgagtctggccatagctgcctgaaggtcataaagcacctcaaggttcctacctcctaaacctgcagcctaggatgggaaggcctcctcctcctggggcaggcttgcgccatacccacacagcactattttccaggaacctccctgcctcccctgtcccttccctgggtgttggtcaccagatacctgttgccccccagcgaatcctggaggagccgagtgagcttggagtccctgtagggaacgtgcaccaccttcttgctctggtcccctaaggcgctgatcacattgcccaaggccagctgtgggagacagaccctggcactcagcagtcactcagggagcgaagggtagggagggacaagaaaatccccaacccatctgtacctgcctctttggccccagcagccctcttgctccttgggtgggtttataggcacatggataagttggtgaaatggggaagctggggacaggggtgacgcctgagagtgaagggctaattggcaagatgtccaaggaggactcagcaggtgtaggactgcagggccttggaggggtctgagactgagctgtgtgggtgctggggctgatgacccaccatgtgcctaccaggccacagttgatggagatgccctccttggcccgctcgccagtagcccctgtccgcttcagccgctctgagccggccaggtccacaaagtgaaacttagcagtgagtgtctcatactcactcgagggaggtgtaccatcaggaagcccagtcaccgcctcattcacctgcagcagaagtcagctctgactcacccagccctcgcccacctcactggctcccctgatcacagtactgccatccgggagaggcacggtggacggccaagcgccttgcccttcgcacatgcagagcatctgacaatgtgcacagtatttgcacaagcctgatttccatttaatcctcacaacaccacgatacagagatcattaagccattttacaaattgggcaacaaggctcaagaaaaatataaaaatcaacaaatggcagaggccagcctcaatctggtttgctatttctgaatctgtggctcctcatcttgcccttcccgggatacccctgcagcaagctggctcctgggccccctgcaggctcctcaccaggtcgggctgggtgcacatgcgcatctggcacaggtggatggtgaagatggcgtgggagcgtgagctctgcacgttcatctgggtgctggctgtggtgcgggacagggccccctgcttcaggcactggatcagctggaaacagaagcagaagtgagggcttgggactaccgtggtgccagcccctgccctttcaggatgccctggacctgctccagacctccagcagaggctcacctcctcctgggagtggatgaggcgagaagtgacgccagtggtgtagatgccaccgtttgcgtcctcgtggatcttgatgttggacctgcggtggcgggtgtcagggtcacgggtgctgtcaaacaggtcaaggatctcctcgttgtagagctgtgcaggaaggaaacagctgaattcatagggcattcactggggccccaggtggctgccacatgcctataaaccatatctgttttacagatgtggaaactgaggctgtgggtcccctctgggttttgaatcccatgacctttctgcaggacaggggcaggagacagctgggccctgggcagaactagctggaggctgcacactgttcctcattccctaaggaaccagcagccagcagctcggtcccagcatgggctgaggaccaaaagaggacaaagggacacgggtcccagatgtaggagataaggaagatgtggccacaatttgagaagatcctgtcgtattcctggacttggaaagagtagatggggatgtgattccagatgaggcagggcagagacagagctcagtggagaccaggggagctgtgccctagccctgactgtctctgaggtgacgacaagctctcgaaggggaggaacacgcctgtgtgccttgccctatgcttggcagcgggtgggcatggagagcacgccactgtggcctagtgtcctggagagggcctggtgagaccatcgtggggagggggcctggccaggagcagtcaccccatttcaggtggtctcagccaaggagattcctgtgtttggaactgctggcatggaaagtgtcacctgctgaagagctgggatgttcaacaggcagggaactagggctggggagtggaataagggatgggggcagctagggcagcagccaagaaaatgctgtgggactaagggggagactgcagccctctgacatctggggctttgacagccctaaagggacagaaataccccacatgaatggggaagaggagatggaaaggatggtgcagatgggggcctacaatatctgtctgtctgtctgtgttggggtagacacacactatcatttgacctcttgtggttcaccctatggaactgattttctaggaacctgctcttccgggcttctccatggcaacaggatagggaagggacaaaaacaaagagatgtgagagagaagcttattgagatcacaagcagcaggacacagacacagacacgaacacagacacacacacagagacacccacataaagacacagagatacacagacacagacacagagacacacagacacacacacacacagacacagagacacatagacacacacacacagagacagacacacacagacacacacacacagagacagacacacacagacacacacacacagacacccactcacagacacagagatacacagacacggacacagagacacacagacacacacacacacagacacagagacacatagacacacacacacacagacacacacagacacacacacacagagacagacacacacagacacacacacgcagacacccacacacagacacagagatacacagacacggacacagagacacacagacacacacacagacacagagacacacagacacacacacacacagagacagacacacacagacacacacacacagagacagacacacacagacacacacacgcagacacccacacacagacacagagatacacagacacggacacagagacacacagacacacacacagacacagagacacatagacacacacacacacacagagacagagacacacagacacacacacgcagacacccacacacacagagatacacagacacggacacagagacacacaaacatacacacacacagacacagagacacatagacacacacacagagacagacacagacatacacacacagagacacacagacacacacacagacacccacacacaaacacagagacacacacacagacacacacatagacacagagacacacacagagatacacacacacagacacagacaggcacacacacacacacacagacgcgcacacagagacacatagacacacgcacagacacacacagacagatgcgcacacagacacatagacacacatacacacacacacatacacagatgcactcacacagatgcacacatacaaagatgcgcacacagacacatagacacacacatagacacacaagacacagagccacacacagacatacagacagatgacacacacacacagatacaaacacacagtcatacacacataggcagtccatttatcagaagcgaaagtccagaggggcaaagaaaacctccaaattctaaaatgcaggataccctgcagggcaagccaccacctgtgtgcccaggagggagtagctgtgttgtggtaggcaggggctggggttggggaaggcctggagagggccaaagccacatgcttccctcagaaggcaacctggacacaatcagagcagcagggtttatgggataagtgcccttactgagtgggggctcagcataggcccaatggtcaagagcacagagaccccctgctccccactaaaagcccctccctggctgccacagtctgggcctgatattctcccagagacaggaagggccaggtgcacagaaagacctttcctagaggacctttctgccctggggtcagagaagactcagggggccaggaagcatctgagccagaaaggggcaggataggatgccctgaggctgagggggaacccagagaaggccagaaggaagggagagagccagggttctcacaaaaccctaaggaaacaggtaccaccccattttgcagatgaggctcagtgtggtaaatgactagcccaaggtcacaaggctaatcagtgtcagagctagaacacgtcagggtgtgaagggatcatacagtcatcaactcaagctccatctgatgcaggaaccccttttgagtgtcccaccaagtagtcctccagcccttgcttggattctttcaatagcagggaactcatcacctggagatgcccccatggttcccaggactcattccactgcactggaggaaggcccggcttccatggtcctgttgtccaccaagcctcccacctgcccaccctatggggccacagtacctccagaaactgggcgctgactttgaactcaggtccagccacgccctgctcctgtgcccggcgcttgcgctcggcaatgcccccaaagaggtgtgcgatggccctcgggatgatgccctgctcctcctccgacgttgccatgtcaaagccagtgcccatggtgtacgtcttcccggcccccgtctgcattggcaaagataggagggtgtaaccctgcaccctttgggggcaccagcaagccctgtacctgggccaaatccccttagctcatctacctcccagcccggttcccctgctgctttcttggtcctgaagccacactctggggaaatcactgacagccctccctctgctaaccagcggtgcaacggcctccttagacaatagacaaaaccctgaggctatgtttcagctgctctgaaggtggagctttctctccattggatgcagggagaccaaggctggagccgccataggtgggcgtgaagatggcttacctgcccataggccagcaccgtggcattatagccctcgaagcagccctcgatgagcttgctcacacaggtggaatagatctgttcttgccaggtgtccaggtcgaagacaaagtcataggtgaaggccttgtccttccccagcaggacctggggctctcccggggtaacagaggtacagatgtgacagccctcaatcttctccttcgacagctggggccggatcctgcccatgatggagagagccctgggtcaggcccagctagaagggggctgccacaggcccctccctcacactgcctgccaagctgccacttcccccatgagccagaggaaaaggaaggaagcttaggtgaccccagaggacatgggcaacttttgtaatacaatagtaataacagtatcaacatcatcaaaacagcagttgttaacatttattgagcattcagtatatatcagatctgtgttcagagtactttccttaaattaattcacgcattcttcactataaacttgtgaggtacctattatttgcctaattttacagatgagaaaactgaagctgagagagtttaaatgaccctgcccaagggtgtataatggaaagtgatggcgccatgtccaggtctgtctgacataaaagcacgtactcctgattggaccagaagccctagaaatcagcatctcgtcaggggagagaaggcggcttgtccactgctggggaggcaaagcacagggccagggcggggaagagaaggaactggatgctcccacagctctgggccacattcccagagccaggactaagttctagaggaggccagagcctctgccaatgcccatgggggctgcaagcaggaggccgggagctcccctccctgacgccagaccaggagcccccttcccagatgccagagcctggtagacattctcaggctggagctctgcttcctttccaggagttgggcgggggagggcagacctgcatagctggggctgaccaggtcaagtcccaagttcccttgtgaagggcagggacctctagaaaggacgccaggccagcctggggtgcgctcccaacccagattctggcaggcttccctgtaaagaggaagaaaagcggcatcaggactgagaagccagccatggacacaactatctccatccagccaccccttcctttctctcccaagcagccatcaccacgacatggttcccatggcaaccaagcaggagtcagcaagcatgcgtgtacagggattggcggaaagcaccacccccaccccaactccctaaagtaaaaggggctgggggttaggctctcatgcccatgggctcacacaagccagcccatcagcaggcacttacaatgagctgcttgtcaggcctcctctccctaagccaacactcaccaagagaagaaacaatgccaggggccaggccagcacccatcctgggcccagaggcgcctggtcacagagtctagggcctccaagtcgccaccctgtctctgtccccagctgccccagcccccaaggcccactcagagctgtaggctgggaaaggtgctcacctgagcctattgcctgcacttccacggcaagggagttaaaggggagttaaaggggactggggaggtggggaaagcccagcggggaggggttgggggtgagcaacaccaggctcagttcctacccacagatgggagtctgggccttcttcagaagtgtttccggggtgtgaacaggttcttataggtcagtggttctcccctaaaagggatggaagcccaaaggaggtcaccacatttatccagctgtctcgcccaaattggaatggcagcccagcttcttcgtctcccaactgaattggcttctgcctgggaagagaatggctgattcttgctcatccttctggacctccagaccagaaacttgagtctccagtaagagctcagggtcagcaaggctcctacctctacttctacctctactgctaataagggcagcagacatgcactgagcactcactctatgccaggcagcatctaaacactaccatggattaactcttggtcctcacaacactgggaggtgacgattatgaccctcgtgtatggatgaagaagctgagatggcacacagccagagtcacaggtcacagacagtcaggagcagagccagggcttgaacctatgcagtctgcatgcactgccctttcaatggtcttatgctacaccgtctctaaagaccagggttcagagtgccagggggaaagaacatctcatatatgcagggagagagagcaagagcaaccttagaaggaggagcgtggcattgcacacaggtactgaacaggaaactgtcttttagacctggctctgcccctgggctcttgggacccaaggctaagcacttcctctcagagcatccaggtattcctaggtaaaccaagtgcctggcctgggcagcctctgaggaccctccagctctgctggctagcaccagttcctgaagacagcttccctaccacgtggctgcctgaagtgggatttctggattcagttcaaataccatttaattactgtaggcagatggcaatgctgatgattggagaaaatcgaatcatcatccctggagacagtggagcaggggagggggagcaacagccctgcttgtcagagcccttcaatgagaggggcagcttctgcttcagcaatcagcccccggaccacctggggagcctgccttccaggatcaagacagtgggcagaacagtctgggggagaggatatagaggaggagaccccagggttttagggtccaggagttgcgtggtcagttgggcattcaccctggggcccttttttggcccaacacatcctgagatgagggtctttgtggtcagaaagagacgtccagcccaatgctggtccactcttagcaccagactgctttgccagggtgcaggtgagcatgcctgagcagtgtcacccagagaaactgatactggctgggagacaggggggcatggaccctggttgagtcaccaattccccaagcaacttacctggaagagggagagactgttggactgactgaatgaataaatggaaatggaagcaaaggaaagctaagatgtcagggacgctctccatgtgctagcgctggctcaggcacctccacaggttaccttgcttaagtgatgctatgacctagggatttaaatccccattcttcagcaaggaaggttgaggcttgaagtggttaagccacacacacagtaaatacagtgaagttgggtatcaactcctgatctggctgactgaatgcccttccattcctcaagctgctttctgtcagaaaactctatgtatgtatgtatgtatgtatgtttttgagacaaagtctcaccttgttgccccagggtggaatccagtggtgcaatcatggctcaatgcagcctcagcctcctggactcaggtgatcctcccacctcagcctcccaagtagctgggacaacaggcacgcaccatcatgcccatctaatttttatattttttgtagagacaacgttttgccatgttgcccaggcctgtctcgaactcctgagctcaagcgattctcccacctcggcctcccaaaatggcattataggtgtgagctaccacgcccagctgaaaactcttaatcctaaaatcactaaataaaattcatcccacaccacctccatcagagccatgggggctctctagaaggagtcctgcatgtctgttcacatatgctcagggctgggcatcaggcttgccctgcctttgagggctcacagtttggcggtggcagacactgtctcagtcatcctgggctcactctttaccacaccctgcctagtggcaaattcaaactgacgccccacaggtaggagacaagagggctgggagacatgagaccagggtccttgccaagcctctgccctggctctcttgtggtttacgagccactgcttccttctaggttacctagaaggtctgttcctgctttcaactttctaagaactccattgcccatccctccagcagcctcttctcccggccccacccttggtgaggtcacttctgtgggctgccctcaaagtgacagtggcctacttggccccagataagcagaaggaagaagcagtgtggcaaggatgggcaccatctaacagtccttttcctccctgggggcatgggaggggggtcaaggatctctaaggtcttcctttttaaaacgtttttgcagagacagggtctcactatgttgcccaggcttgtctcaaactcctgggcttaagtgatcctcctgccttggcctcacaaagtgctgggattacaggcatgagccactgcatgtggcctctagggtcttccaactaaaatacaggtcctagaggctgtggaccagagccaggactagggtgaggcattgaccctcagtacaaaatttaaggaggcaaggaaaaacctcagtaatcaagataaattacaacttagtgcaatattttaaaagtcaaattagcaaattgtggcccacgggccagctgcctgtttctgtcagtaaagttttgcggcccaaacatctagtgtcatttctgtccagggtacctggaggtcatctcactccaggccccacccctccaatcttccgtccatcccttctcaaggttctgccaggagggagggccggctggacagccccactcagaaaggcccccggaatctcccagaacagagccgggcctatttgccacttggcaacccggaggctgagcggcgggtagagcgggcgcgagagcgaggagaaagggcccggagcttttcagagtcaggatctggcacaggcagcgaagttgctgagcttcctctgttcacaattgagcaggagcgggtgtgatgtgggaagccgtcctccacccccggagaaacgcgcacgcggaggccagggacatgcgggcggctggggagcccctatcctcccaggctgaccccaccccctgcccctgacccgctgggtgcctgcggtggcagcgggacaaaggctgcgagcctggagcacagagctgcaggaagagctgagctcagcggatcctcggctcttaggggagccaggaggacagggcggaaggggaggacagaggagacagggaggaggcagcccaggggtatgctgagagactgccaaggagagaaaactgcaaagggtaccgactgggcacatctgggcacgtgctgggagcccgcaccctctcccgcgggcttaggagggggaggatggccctagccgggcctcatccccaacctggtccttaatgacatcacacaaagcccaccaatcagccctcccaggagctctgcccagtgaccttggactcctaggggttggctcagcttcttaggtgaagtcagtcccacccaatcagctggctagggtccctcccttagttcctaactaagctgcctccaaatctttacactgaggtccccattggtgcagtcccaggctctttccacttgaagggtctgtcttctcactgacgagaggtcacaggctatggtattaaaacagctaaccagaatccaagaatttcttacaaatatggtgcatgatctgtgattcctgatgccttttccttgctagtaatggtaacaccatcacacttggcttactaaacttcctcaattagtcaccaccaacacatttatagagccaagactgcctctcatagacactatctagggtgctttgcacatgttaggtcattacattatatcatttagttctaaggtgggtgtttttgcccttaatttacaaatgagagctcagagagaaaccgataactcggctcaaggtcacatagctaatatgcaaaaaggttttcacctttattagccatcagccctgaagattcaatccaggggaaatctggggagaactggcatgctcgcagctgcccacttgtgtgtaatttgcactttagggattttaggctggcagacaccctcttccctacctcaaaggctttgagaagaaccagacagctggactagaatcgcctttcagatggccaaaatgttagtcccttcagaaaaagccccaggggggctaaaagcatatctgctcttttctgctataagacccctgatgcctttctggaatcttgaaaaggagctcctagaagctggtgagacagcctagggagggactgcaaagtcagcaagcctaaggggaaaagcaatgtctgccctgattccatgatctctgcttgtgcccagcctccaattggcatgcctggctcagcctgggcagtggggcagagcagagccaggctgctgtatcctctgtggcggatgagtgagtgtatggaggggacacagagataagcccggtgatggctagtctgcctggcacacaggggtcacttagccatgtggtgacttaccaggcaccagctcttcctcatcagtgagagggcaagatcaaaagggaactcagctgtagcaggagggatttagataagctagcaaaaagaacttcctgcctgcaaagatgattaagcctgggagaggagaggctggaggggtctgtgcagacttctttctcagaaatcattcgtcattgatatccctcttgccttgttctacgtgttcttcaccacctaggacttatctgatgaggacacatactacctagtactttttaagagcctatgtgccaagctcctttatgtacacgaacacatgaaatgtgttaagacaaccctgtgaagctggggatatgtgccccatgttactaaggctcagcaggtgaaatttaacaagctcaaagtcacacaatttgtaatggtggagatgaaattcaaaccaaacctgcctgtgcccaatcctgaagcattcaccaagcagctctgcaccagggtgggaaatagcttggcttggagaaaaacgatcccttcagagaatctcccggactgatcctacggacagctgccagcagtgccacaagctgtctgctgggaaagcgttttccctgtctcatgcttaagaaagctgaagcctggagcagggagaagtacggagtcgggaacccaggaggctgcttccctgtcagaggaaggcggctttcctctgtggcagaaagaggacgtctacacccccactttaatgagcctcctctcctcctccccatggcagcctgccagctctggggaaggcggctggaagcaaaatccctgctctcaggggagtctggctcccagacacccgggggcttttagctgacagcccagacaaagcatcttcccatagagaccagtcttctataaaacagggtggcaagatccaatttggggtgcttgcccttttagctgcaggggtaaggtgtggggagagcccagtattattgggggcagtgccatcagagctctgtgacagccagagggtcttgttgccctcccatttgtccctctcctggcctctcagacccttccccaggccagccctcctgagactgccctcaggactctgaacccccaaacaagaaggctttgtattatggagccaaagagcatgggtttaggaggccttggccggcatggtgcaagcagtctgtcaattctctctgcctgatttttgcccctaatcactttcctgtcctgggtgtgatactccaggaaaacctacaggaggccttggggtgtcagcttgggatgcttggggttcaggactctgaccccaccccctcctcttgagtgtccttgaccttactagggtcttggccactggcttctgagtaacgctaagggtcaggcaggctaacaggggagggggtgcctgccatgaggcaccttgagagtcctgttgtctatggccctccagggcatcaggatctcagccgtgcagaggaatcgggccagcaaggagagtggggtgaaatgccagggagcagggatgtgcaggaggagctgaaagaaggggccagtccctgtcctgagttggatatatccccagcctgccattggccacacaagcctggctgtgagcaggagccaggaacttcctgggccagggtcggactcctccatctctggggcctgggaagagggtaaacccagcccagggaagtactgctcagctgtgctgcagcgccactctccctgtcccacccccatctcagggcatctggcaggggtttcccatgacctccccagagacaggagacgctgcagagtcaggcttcgcccagagcccagagctgtgacggtattggcatctgcatctggtggggaatggccagtggggactgggccctggggatgctcccctgctgaggaatgcagagcaacagaaggctggctgtggagggcagcaagcctctccccaccacaccggccctggccccctgcccacactgcatgcaggacagctctccagggtgcaccttaagtcagcctcaggtgggaccagcccagccttcataaaggacagggggcttcacctcaggaaagcagagggatagacactcaggcatttggggatgggatggcagcatgacctcctttccacaccccagagcagctggaggtgaaagagaaagtcctccagaaacagggtactgcagccaacactgctgccgcctgccctggagcttcacatagggattgaggtgggtggatctctggggccaaggaagagccgttccagtccagcttccctcatggcagggaagcaacctctgacccccacccagcccagggccctctcagtgcccctctggctgttctaagagggaggggcacagaagacattgctttcctcctcaatgttctcaatactttctagagggtaaaatgaaaggctaggagacctagcacacatggggttccgccctttggtgtgtgtgaggtggggggccagcaaaagacttggctgcccccagaatatccttcctgagagagtgccaaggtggaattcaggcaggaagacacatgccagggatggctgcagtgatctaagaaagggagaatgtggctggagaagctccccaaacacaaacgatgacagcacggatttaggagctaggaccatggtggtgccaggcagccccatgctgctaagcaatcccatacaggagaatctggacagcctcagccctgccacacatctgcacagcaccatgtgcctttccattttcactttcccacattcatgttcacggccactgtgtgtagtaaagcatttgaagaaactgaggcatagagacttcaagaacacagctaattagcacctcaattaggaggcagcttagagttgcatgaagagcatgtgttcacaactgagaataccctgggttcaaatccagcctcctccatttgccacctgtgtttgtgcatctatatgatgggaataacatcaatcacctagccagctgaatgggatgctgtaggcacagagtaagtgttcaatacattatagtgcttagccacctcctggttcatactcctctccaccacaccatgcattctgctctaaattaatatattaatcaaaggactggaggtgaattcaatttactaaatagttcactaaagcttaaactacagagacatctcttaggtacacttacattagggcccattttattttattttatttttgagaaagattcttgcttagtcacccaggctggagtgcagtggtgcgatctcagctcactgcaacctccgcctcccaggttcaagtgattctcctgtctcagcctcctgagtagctgggactacaggcatgcgccaccatgtccgtctaatttttgtatttttagtagagatggagcttcaccatattggtcaggctggtcttgaactcctgaccttgtgatccacctgcctcagcctcccaaagtgctgggatcacagtcatgagccactgcgcctggcctaggacccattttttttaaaaaaacattttatttatattcaattcctcaggaatctactctgcattttgttccctccaaagattttatgtccgtcttcctccaagccactgctcttcacaaatgaacaaaccagaacacagcagttcccattttccagtgggtaaaactgaggcccacaaaagacaaacagggaaggtgccccatgacgaagccagtggatgaattgcatcagttcctgccctgccctttgcccccagggttgcaaaaataagcatgccaggcacatatcacctctgccacctccctggcccaggcctgggccccgcctcacctccacttggaggttttcaaaagctgagatccaatcaggcaggcaggctgggtggtggagggggaggtttccggggcctgtggttactacactccacttccttatgatgacataaaccctatttctgcagcaggaggccaccaccaagattctcaggtctccacacagcccacatgaggccctgtatgggcctcagtttctgagatctgtaaactggacacaggtggcattgattggcattgactggctttgggactcggaaggcaccccaaatacccattcccccacagtttcttctgtcttcttcagtctttctctcccaagccaccactgctcttggttcaaaattcagacagtcattgaccaagatttcagagtagcctagaactagggaaataactgcagctagagaacccaaatgggagagggctggggtgcaatctaacattgtcccttgggtcccttggatcccccccaaacccctacctatcccctacttaaccctgtagtatcaacagatggatgctgggctggccaagcaccgccaagcagactaaaggaaggaagcttagggaagccaggcagagataagaggggagggggctaggcaacactgaggtctcccctcatggtgggggctcagagctggggacttgaaagggtcttaaacaaatttgccatgtgacttagcttccttccccaatttcaactttgccaacttgcatttcttaacagctacccctttctcgccccatttgtcaggcctatatctctgcagcctggggcaggtcacagctccgccccacctctctctagccttgctacacacctcctcccccaggtgactgccagttctagtccagcccaggaagctgagaatctttacagtacaaggggattaatggataaagggatcacagggcaggctggagaggccagcctgggaatcccttggtgcaaagccgactagcctgggttcagggacagatgggccagattccatctagctggggaggccacaaggtggggcttttggggtctgctcacccctgaactttcttcccttaccctgagccccaggtcctgaaagtttcctcctccggctctccaggagcccaggccttcactgaagcgtttcacagccagccagcttcgatctcttcatcccaaacagattgcagggccaagagccttaggcctggcacttctcacctagtctaatagccctgggacctctctcctctacacacacacacacacacacacacacacacacacaatcagaccacacctgtctcattcctggccttccctgtctgaagagctggactccaggctcgctatgttattctcatggaaattcagaaggcacttcagttggattcaagaaaggacttccagaaagtcagaaagacagctgaacctggcaggaggtagtgagccctggggctggactaggccctggacaagccttgcccttcccataaatggtctactgtagtgcagcccaccacccagtctttcaggtgagagaagtgatttctgggggtgctgcgggggaggatgggtagaagaggatctaaaaacaaggaaaactccccctacagcccatcactggtaccatctgctctccttcccagcccagcccagccccagctcagtcctaagctctctgattagaaactgggttctgtccaggcattgtctgctgtacacggccggctgcccattgaggtctggcgtgtgccggggctgggcgctcatgctggggtgggaggggaggagtgggcggggcccttaccttcccggagaccctgaaagcctgacttctgatgctcaaatgccccacccccaatccagatcagcaactgaaaggcaaggcgtgggggcacccagaccccacttagggcaatctgactgggaaccagagatgacacacatggtcctgaactgggtgcagagggcaggcatgatcccttctctgcagaaagggtcccgggaagcttctagaggtggcagtgggaagagaacatcagcttctcctcactgtgccaatcccatgaggctccccgggtgggagtcccacatcttttcagccccagtccagcctggagacctgaacagaggtagggggcctttgtttagctctctccagcaagatggaatctaaaggaaaccccctgtggaaagggcacccccaagccccttccttcccagccctcattcacaatgggtgggggccagagcttcatttcccttttatggtgttctcggactctcccaatctgctgcagatgccatatttacatttctcactcccaccccccagccatgcacccctccctcgacctccacaagatcctgctgcaatgtcagccccagcagcagcctggccccgccccagtcagcccaccaggcacctgcagggctcctctttgtctctggctgctcagggccaggaaagctgtgctcaagtgattcttgagtgctgcctagggtgcatgggtgggggtgcctcaatctccttcccttcacccaagcactgatcagtgtcagctcctctttgggctgcagaggcctggccaggtggccgtggcaaggggcatctgccctggggcaggaagaagaaagctttttcattgccatctctgactctgtctaggagcaacctcctaggacccctggaatctgggtcacatatgacccaagggatctagagacctgagagacctaccctagacctggacaatcccccgccccctccatcatacagggctggggcagagatagatgttcttgccacatccctaccttggtgagcagctccagattggcactctgccgccaagacacccctctcaaagagaaaaacccaaagcaaaaactgggagaagtggtgaggtgtgaagcatctccacccagcacaaagaacacagatggctcaatttcacagcatttcctgctcctgcacctttgtgtacccctcccaatagaacccacccagccatgtcctctccctgtctcatttctgccggctcaagtcccggagctgttgagaatggaaccccagataagtctaggcaaccctcccctgctcaattttatctgagtgcctgaggatggggcatctgcatcacaccctcctgccctctcagagagaagcacctcagatacacctcttcctcccttcctaggcccatctcctcttgggacaggactggtaggattctcccccaaagccattgacttcccacagaaggccaaggcatcatcccagcttttccgttggtccccgcacccgatctttgtctgcagatctggctcccagggtgggtgtgctgcctttgctagctggaccaagagcacataactagctgactcgcatggatgaggggaaatttccctctctggtatccccgtatgagacagcagcctcgtggggaggcgaagaggaaacgcacagacgctccggcctgggccagagctgggtgtgaaataccggatttccttgtttattcgattttctgatcattaagggctcccaagaggggcccaaaattaccacccaaacaaagccaccttccagtagtcggcggggtcgccgctcccctgcggcagactggccagcgcgcggcgccctccatcccgtcccacgccggcccctcctccgggagtgcaggctccagcccaagcggtgctcgcgccccccgcccaaagcccacgcgagacaaagcccgaggcttctccgcgcgcccccttccccgccccgggtccctacctgacggccaccttgacgcagcagtccccctggccggccatggccctctggagctagggtctgggcgtggatcagaggcgggggtctgggggccaatgcccgaggcagcggctgcggctgcgggaggcgggggcgcgggcgcggctggcggaggctgcggcggcggcggctggaggtgacatgctcgcgggcggcaggccgaggggctcacccgcggccggccccccggggctgggcccgcgcgcctcctcgcgccatcgggcggcggcgcggagctagctgacagccggcggcgcgacccgccgctccctacggcgcggcacacgcgcacacacctcccacccggcagccacctcccgccgcagcgcgaacaaagggggcgggggccgatccggccccgagcccgccccgagccagccccgagcccaggccgggccccgccccgcccaggagccgccaatcgaaagccctaatgagcagtgggggcgggactcgcgcctttaaagggacctcttggctcgcggccacggggtggctgggggtagggggcgggattgaagggtgggggtgggggtaggggtgggagtaggggtgggggcgctggacgcagaccacgttagaacctcggctcctggagtagcagaacctcggcttcaatgggaccctcatttcataaatgaagaaactgagattcaaagaggggaactaccgaaggttacagagcgagttcgtgggtaagcatggtaagaaccctggtctcccggggatcccacagcgattgacggtttatagttcaaaagagccaggaaagcttcccttctgcatttattccagtaaattcgccaacccttctcgaagggagttcttgctagcccctaactaaaatttcccccacctccaccctgcagcatcttaaagctcatgttttagttgattcctggccaggctcctagcccaagactagcccctccctactgctagacgactgtcccattgacctttatgacccacagatgaccccactgggcctggctcacactctgcttgttgtggctgtggggccagagggtcagtgtgggaggcctgagctgccctgggggaaaggagggaacaaagggggccctcagttccgagcacctgggtagagaggctgggcggtgaagtgggtggggaagggaaggagggcagctgcctgcaggaatgggtataaaggacaaggaggaccatggagactttaacgctgggcctggatggaggaggagaccagtgctgcaaagtcacaattcccttcccagtccatctccctccctctgagcccagacgcctcttccctgccccctgcctcccaacattggggccattcacagggcccctcaccagctgccctcacttcacccagctccctcccctggaaagggcccaagaggaggacccagctgcagccccagatgtggatggggatctctgggggaggggaggaaggggagtctgactccaggcctcttacattaccctcagatgatgaaaccatgtcagagattttggcaagggtgtggactggggtctgaggatgcatctgttggtaccatcttcctccccttccctcctccactcacacccccctccccgccaataactgcttcatgcagtagctcagatccctgtttggcttgacctattaaggtcaaatcaaaaccaaagataatttcaagggcaaatttcaagggccaatcaacacatccttttcatccccatggcaaacaggaggagcaccgccagcagtgcccccatgatgggggctggagaagaggtcttggtggtatcctggaccttttattagcatttgaatctagaggaa

SEQ ID NO: 304 - DNA, 45175 bp, Homo sapiens
  source 1..45175: mol_type = genomic DNA
cccgttttcattctccaggctgcgaagagacgggtaggggaagcgcttccggccccccaggctgggtggaaagcgactgcaggcttacggatctcagaaagagtggagagcccctgccactttattccatacccccttgcgttttcgaacccctaaggtcatcaacgacccggaaagccgggaggggatcacccaccccactttctggggagtgcgtgcgtgggcggggaggcttatccaagtaaaagggggtgggcaaaacggaaagggtcactttgacgtactgagtctctgcgaaggcctcaccgtatgtgccggcagccgcgtgtcctggtctccgccgggtcacgaccttcggagtttccgagtgcgcctcaggcctgggacgcgcggcgctgtctccccagtctcggagccgtgtgcgcagcggccggcagggggcactcgcgtcacggggagcccgcccgccgcgcccgcctggcttgacccgggctttggggctgacccggagcctggcccggagctgcctgcggccgcggatgccggcgacatttggggcccggctaggcacagagcaactggtcgccagggaagggcgggggggcggcctcccagccggagacaaacaagcaattaattccggagctgagttcccatctgccaggcctgctgacaacaggtccggcgcacgcccgcaggacctcccgcttcccgggcggcacggcgcgcacacccacttgcgggcacacgcgcggctgtaaagacacgtgccgttcgcagacgcgccgaggcacagatacgccggcgcggtcgctgcccggctcgaggcgcacaccgcggcgacactaacccacgcgcgacagttagacctaaagtggcccgcgacacgcagagtacgctgggcttgctggaaaggcgcctgggagtctcggggccggggtcccgccccttcctcggcccacctcgccgtgggccttgggcaagagcgtcccctccgcagcctcagttttcccgcctgtagagggaggggcgtcggcgcctcctgggagacgcgcagccctggtgtcccgggagaggggcgggaggcgcatgcgcgcgcgcaactagatcctcgccgccgcccccagcgcccctccccggggcagggactcacctaacaggttggggtccttggagtgcgcggggccgcgtggggaagcggggaccctaccccccccacgcgccgcccagcactgggcaagggcggggcactctctgggctcccgcccctcgccgcccgccccgggagcccgagccccgcccttccccggccccgccctcgcctcccgagcgcgcccaccggagccaccgcgctcctcgcgacactcgcaggctctgcgaacttccgagcggctgggccgggccatgggggcgcctcggggccggatcacgtagccgcggcgcccccggagagccagcgtggccgggagcgcctgccgggctcttcccgcgccccggccatggtcggccgcggcgtccctctgtgcgctgcgcagcccgcggtacgcgcggcccggcctggagagggaggcgggcggcgggggcccgggacggcgaagatactcgcggtgtgcgctggatccctgggggccgggcctcctgctgagggtagcggacccgcaggcgggacctccggggatggagggagtgggtgagcgccagggtcgtgcccagggctcctaactttggcaagagcgtcacgctggggcagggcgcgcaggggtctggatccgacggacgtcccaggctcactgtccgcttccgcccccacaccctgcaggtggccgagggcggcccggcccgcgagccgccgccgctgctggaggtgtccccccgaaagaggctacccgccgggcccgaccaggacccatgcggcagccgccctgctcccgaaggcgccggggccggcccagagcagggccactcggccggcggaggcggctggtgccgccactgccacacgaagctggtggagctcaagcgacaggcgtggaagctggtcagcgggcccgggaccaccctccgggtaagtgacacttccttaggccgacccctccgagcagggccacgccgaacttgggtagaacttggggcttggagggaagcagggttccactccttccctgctgctgtttccacaaagagttatcagccaggacttcccttctgcgggcctcagtttcccggtctgtaacaccatgtgtgagctagggagctcagcccgaggggccctgctgcctcggatgggaggggcctgggctggcgttcctcccccagcccagatgtcccacagctggaacgcaggtttgtgtgggaggaggaggggagagagcggatggcagggactccacccagggcgggacagctccagccctaccagcagggagaggttatttggtgcattgtggcccttggggcacctgggcccccagccaggtgtctggaaattacatacctggggccggggggcctggcaggtgaaagggtgggccacagcagctggggggtccctgcctactcctctcccagcctcaaggataagaactgttgtcccatacctcctgggatagactgaggcagtggccgcccatggggaattgagtcggggccctctgggttccccaggctccagccccaggggcaggtgcttgcaggggaggggttctcctggatttccagccagtgggcctgccggctttggagggagcagggaccattgttccaggaacaatgcatgctggaagtttgcaaaggctgggggcgggtgggggtctccagaggaagcccgctgccgggccttcagcctttatgaaagagttcctgggaagtccgcataatccccattgaatctaaatatagttctctaagggctgtgggggttggagtgagctgagaccctgactgccctgtctggggcagggcagggtggggcagggtaccagtctggtttctgtcctgggcaccgtctccgggctctctggagtctcggcgagggataggattgctgtagcctctctctggctcaggccaggcgcctgtgggcctgtcctggggtggggctggacccgccctgtcctctgctctggacaggctgcagccttggccatactctgtgccccagtggcctgtatctagtttaaaaggtagcaggagacccttgagggccccctggagagggccagccagagctaaaggcccatcttgctgccccattaggggaaacacgccagagacaggaggggcattaagattgagctggtctcctcattcttggagtgggcttggactgctgatgctgcctggccctggggccatggtcctggcatggactcgtggaggggagggggctcctggtcacgggcaggccaggggtcctagtggagagggctgcaggtgatactagtccctggtggattctaggttcctcatctaggggggtgtcttggtctcttctggcagacaggtcttcaggggagccccagaccacccatctccagcctcccctgagcttggcctttgacactggaaactcctcttgagtgccagctgggggctcccccttccctagctggcgctggcactcagcacaccggggtcccgggctggtctcagccagggctttgttctgctctgggcccccttcttctgctttgtggtctcctctgtcacctggggcctgttgtgaagtgctgtcccacctgcagggtgctgtgcccccgggagagaagaccccatcctccactgtctctccacagggcatggggggctgcacctgccatcctggggccttacgggtgtcattgtcctgtcccctgtgcgggcctgggctgtccccagagtcccagcaaaattgcagcctgcagccctggcctggcccgctgggcccagatgtgtggacatggctgcttctgtgtttgggttgggagggaaatctctggggtggccagggagaccccagtgtgctccccggagtctggtgcactgtccagtgggccctggcctctgctctgtaaggccaacgtggcaaggggtatttagggttggtgttctaggatttccccaggggcccgtttcgtattttttaggggagagatgagcttccttgaggatagctgtttacagggaacttcacaatcatccatctgtctcatgcttggatcttcagaagcccagagaagtggagagacttgctgggacccggcctggctattagaggccctcgcctccgggcttcctgcctgtctccgttgtagagggaggcgtagagggtcggggcccagcctgccagggtctccctgcctgtctccgttgtagagggaggcgtagagggtcggggcccagcctgccagggtctccctgcctgtctccgttgtagagggaggcgtagagggtcggggcccagcctgccggggtctccctgcctgtctccgttgtagagggaggcgtagagggtcgggcccagcctgccagggtctccttgaatgtgttgctctttagcaacacccgatgcctgcatggtcctgcctatgctcatcccctgctgggcccttgcccaccctcctgccaggaggcagctcccctgagcaggttcccgagagttcttggccactgtttcctgctctgcgacatgggaccgtctttgtgcccattgcataggtacgtagagcagtgcccggaagggatgcactctcaccttggcagctgctgctgctgtttgctgagttagggactccgagtccctggggctgttggagcccaggttcccggcctacctctcccttgctgtgtgctcttgtctgcctgagcctgtctcagttcccttgtctgggcagtgagggtgaccatggtcccctatctggggacctcatccctgtggcatggataagactgtgccctccccacctttctgagctctggtgccccgtctggggccgtaggggagggggacattgtcttcctgcccctgttggagccccaggggattgtctttcctgatctgagaagggtgcttggccctgggtgtggaggggaagccccatgatgggactctggccgtggctcctgctcctcactgtgtccccacactgtgccctctgctctcaccagggtcctcaggccttgtctccgggctgactacttcaggacccccatggcctggagcggccccctgtggcctggcctcctgtggcctccagggacctttctctaatgggctgctctgtctgccctgccatagatgctgtcctcatcccaagaccccctggcctccctgggctggaggcccctcagtgtccctgctctggcctcaggggccccttctcaggtgcccccaactctgagatgtccctgtgggaggttgcagcctggtgcctcccattcagcaggcaaagctggggcctccctctttctccacatctaaggcccccctcgcttccccatgctcacccaccaccgcaaactgttgtggcagacctcttccctctccctgaccccagtcctggtttcccccacaagcaggagctctgccaggtcaggcatggggtccgggtcacctggaggtgtttgttgaatgactgaatgaccaggcttttcctcccacaccccacttgctggtggtcacccccgggactgctggggctggattccggctatccgcccctcaaaatgacagttcccatggaggatgaccatccccctcccccacaaaggatggttccctgcttcaaggagagggtccctgcttggggatccattccagctgctgacagacacgtcatgtgaggtgttgactcctcctgagaccccgtgacatttgaagcgtcagtaccggtgctgaattgattatcgcccccgatggggaaaatgatcaattctcatttagctcccgtgcatctcttgcttatccaggcaggggcctcatccttatgcccccaagagctccagaaccactgttggtgccgcctgctggtgccacgcagctgaacagtgagggaagctgcccatcgaggctgtggctctggactctcctcccggcgaagctccgggtggcccctgtgtacagggaatcagttgtcatggtctgaggctgggagccctcctaccgctctgtgtggcttggcgagtcctgtttctccttggacgctgctcatgggcttctgtttgcttctcctgttgcctctctggtttgactggaggtgactcctgccagcttttcgttcctcctgccagcttttcgttcctcctctgtcacttgtccgaggaagccctcttagccccctggatggatgggggcatctctgtctccacagcccccaggcctgtgatttgggggtcccaggtctgttgcccccaaataggcaatggtcctgggagggtaggagctgcgcccgagtggtcccatgacggatgctcgccacttgtggtcagagcccctgggcccccagacttggggctgccaccttccctcgctgcttggagcctggcccggcttccactgctgccagggccacctttgtgcctggcagtggcacccgcctcggggatccgcagggtggggtgcctggcatcagcagcattcccagctgagcccaggtgtcacaggctttggtggcagcctggggaggtgtgagggggcacggctccctggctggcaggcggggcactggctaactctaccaggaagggctctgctcgggaggccgtggagctcggagctcccagttactgttggggagggagcctggggaagggccgggagggaggaagcctgggtgggcccagcctcgctgtgcagcctctgtgggacctgggctttctcttccctggacaggcggtgctgcctccgggattccctgtggttcagcatgtgatgggtggagggcacgtccttgtgctcgtcttgtctctcttgcttctttggggtcccaggggttgaggatgggcatttgggggaggacttgagcttgagggatgtgaaccattgtcctctgaacaccagccagaagcagagatggagccctagcggcttccggggtacaagctttatgtcggggcagggacgtgctctgggggagtctggccgtggtcacatgtgggctgggtggggatgggattgtggccgctggcctcactgcctctctgctgccaggtagaggacagggaaggagggggactgcaggctacccccaaaccttcagctgctcagagtcctgctggaggggcttgtgagggtttggagtgggctaagggaatgggactggggccttcccaaagctcccttaagtaccctggaaggatctcttatttgggaatcagaagagctggtttttcccttaagtaacaaagaaagtctagttcttctcttcctttgcctgctaggaagctcacagcaaatgtgctgctcagctctgggccgcgtgggacttttcttctgctctaatgggaacgggtcattctttttgttccagttatgactgactgtagttgcatggttttgtttttagcttatattttgtagttcctgcgagccaccgcacaatctttgtgcaagacagtgtgggctatgagtaaataagtaagagtaaaagtggactgaccgtgccttggtcgtgtctgcttcagcctgttcatctggtccatggaagcggagcttgtgctgttggggggagtggctgtcagctgggctttccctggttcctggtggcagccaggctgggtggtctggcctctggaagtcctggcccaggaatgggcagccctcgtcagcctctgagctctgcacccacgctgctcccttcctgctggggtgaacactgtgcttggtgagactttctcagggcaggctctggaggctgccacccccaccacggtgtgtccttgtcctgcggggcctcagtttcccgcctgtgaacagtccttgggctgcgtcgtcactgttgcttcttccggcgctcagggtcacttttccttccagtgtcacagtgtctccgtttcgttcacgggcgtgccctggccatagctgcctctccaggatggagtcttctaggcaggacccgtgggctggggtggcccgaggccctccgcagggctgcactgtgctccgtggagactccccagcccacctgtccccgaccccagcagcatcccaggcctcagctgtagggctggggatgggtgggtggcccagcccggtgcccggggctgatggcaatgtgtagtcccgcctggcccggcgccaggtcactcagctcagcgcgctgcattggacctgggatggtcgtgcttgcgtccctcctgcgctggcctctgaccccatgtgatgggtgttgcctgagctttggcctctgtttctggcggaggtgccgcatgctggcccttgcctggtgccctcagggagctcttcctaaatgtcctgtccccatcttccctccccagctcatagcttcggttcacggctgtagcccggctctgccctcaaaaccctcacccctgccgccaacgtggcctccacaaagccctcgtcctccagccgcttgacctagcctgtgggggctgccctgagcaaggctgaaaggcccctcctgctctcgtccctagggccccctctccccgacccccgcaaatttgccttcaccaggaagaagtgtcaggcgacctggctccaagctttatcttccacgcctggctctccatctttttctcctgagggtgggactggggccaccccatcagcccagaggctccccaagatggggccagcagggcagtggcaagggtgcgtctctgggccctggagtcacccaggtctgagttggaaccccagctctgcgaccctggtggtgtggcctgaggcaggtgtctcagtctctctgagcctcagtctataaaggggtcacagactcctggtagccagtgaacagggtggttgtttttgggggtgggtggcccctagggctgtgcagggaggcctggggtacctggcaggggagtgtctgggtgttgggatggtgccaggggcccagcttgcctgctgggtgattgggagaaggctcgtcctggtcctgcccaacttcctggctgcatttggtgttgtgggaggggctgtagcttgtggggcatggggtccctgccctctatagatgccctagaggcctgtggggagagggtcctgagggcggaggccaggaggtctgaactcatccctgtgcctaccgagtggtgggaagagcatggagggcttgggcctgaggagccgggcagcgggtatgcagagggtggcgaccaccgcagatcctctgtgcctgctgctgccccacgtggtggggaagaagtgggggcagccacagagccaggctgtccctggcttctccttctccactgtgtttccataagcaaactgctgtgaccatggggagggccctgggaaggtgcagtcccggcatccggacggctcctggggcggcagtgtttgatctcagagttaaaccaaggagacggggtgagggtctccaaggggtgggcatgtgaaaagccccgagatgggcctggctggagctcacgtggagaccgccacggggcaggccaggtgacaggaggcgggcgctctgggggctgtgtttggagtggagctgtgctccagccctgggatcctgggcactcttggcagcctcgtaggaggggctggtggtgtggacagtcctgtggcccctcacatgcagaggtttccgggtttctgcccagggatgcctggggccgctgggaggcaggggcctgatttgaaaccgagtccacggggccccttggttcacccggtgactgcagcctacatggagttggattgagtgtgcaggtgacccccaggcccctgcagtgcactgagcatgcctctgagcattggggctcctgatgagcctgcccctctgccaccccacctcgccggggccatccttgcctgtctggcctttaaccacccataaccccagatcccagtcatggcatgcgatggaggacaggggaggccattgaggggatgagggtctcaatgagcttgtctgtgccccgagctgcccagctggactggcgcctggcacaggcccttggggatggcgtgccggccagtgctgggtggactgggttgtgtccccgctccctcccctcccagcagaggaggaagggggtaggaggccttcagagctgcagacccacaggatgggaatggtccctggagtcctggctggcagaccagggagggtctgggcctttggagaggtgcccagctgggcaggaggggcaccggggcagccaggtgtggccagccagtttccagactggagcaccgagcccgctccttgccccccgccctgatgggctgcaccagacgtggaaatgtcctggacagcaggacctgcgagggctgctgcctggccgggggtcccttcctggacctgttgtcagctccggaaacagcggctgctcggggttgcagcccagcacgctttgtttgggaaggaaagggagggcaagatctggaggtcatggcccatggggtccttttgagggctgcccgcacacgcatgcctcactgcgtgggtcggggaggggcttcggggcctagttaccctcccagcggccctgccagtgggtgccagagctcctttgtggagacgggtgatggggactcagggagggccccgtatggctgaggtctgggggtctgatggcgtggcgtctctgaactgggagcaggactcccctcgctgtcccagggtggccttacctggcggggaggtttgatcagctgttctttcccatgggcagtggcttggctggagtggggagacttctctcctgcagtgacggggagcggggagtccccggtaaagtcccccgggcctcacacgcaggagaaaatggaaggattacttaaagcaactcggagaccccagaaacaaaataaagaacaaagtcatgatttgtaagtaggggggagactccctaaaacccaggcgcgcaatgggtgggctatgtttgatgctaaattgaatcaaatgaagaaaaacattttccaaatgcaagtaaagtatctgtgtaattagaccataaagagaaaattaaaagtcatatttcgcagtggagtaattactgtcttcctcaagacaccaggctgtggaggcctgggtgacaggcgggcctgctggctggggctttgaggagttcagattcctgaaattggggggcagtaacccgttgggggcttgggccagaggaccccgtgagctgccgggatggctgggagaggaggcctggtcccactgcccagcctgtgcagaggttggaaggtgcaggaagtggccacagagcaggatttgttgttgttggcggtgggggctgtgcgtggccggggagggggagggggaggggaggggcagggctgcagggctgggcggcttttgtctctctgagggctgcgtctggggtctgctgtgcggggagcagtcagtggtgtgggagaccctcgccttcaccttctggggcccaagatgcccatccctgggagccacccatgtcagcagcggcctccctgagcccctccctggagccctgagtgctggtcccgtgtgctgagtggggtgccgagttctcctcttgtcttagctggacagtgtgctgggccccaggctggtcctgcaaataggaggtctcgggtcctctgggctgggctgtgtggctctgagtggccccggcaagcagccctgtggttctgttctacccgagcagtctgtgccctggcccctatgctgtgccagcctggtgcagcctggctggtgtgatggctcagtggtgggggcgatggcgcctggtcccatccagtgtcttgctgtgttgccctaggccggtctcgcataagtgactagggttggagagatggcccctgccctgtgccttgaattcctggggccttgggtgggcctctcagtgccccccatggagcctgctgggtcggggttgggtggtgagagtccctgagaggagggcctcgtggcccgtcctggggaggggtgcgtggcccactcgtgggctttcgctgtggggcccggcctccaggatgctggctggcacctgggctgctgggggaaggtaccctggcccagatgcctgggccgccgctgttgctgagcaggtgaccagcagcctcggcttgtccccagtgggggcttcagcttgatgggcccccctccagcactggcccccaacacctgggacttggatgcccggagctccgaggcctggatagggctggggcctccctggcagctgctgtctgaattcctgatggcaaagctgggtgggggcttgggtgggggccactttggcttcctgtccccttttccctgttgcccctctgcctggccagcccgtggtgggtggtgcattctcaggtcgatccgggcttcctccctcccctgccctccactctccttcctgcctcctgctgtgcagccctggagagaagggcagggtgggcttcccaaggcctgaggtcgctggacgggcagaggctgcctggcctgtctggaggctccagaacggcgagctgggggccgggctgcctgtcaggttgggttaatagctccagcaggcggggacttccttccccttcacacggggccaccagggcagcctcctgctgagtggaaaatcagcataatctgagcctgactggaaaacaggccctgtctgccctcagcctgtgcaggggccagttctgggttctacatgtagacctgtgtgcccactggccgcatcagcagagctaagcggggctcctgcagtgtctgctctggtagggccctccccctcctggtccccctccccgtccccctccccctcctcctcctcccccttccccttctcctccttcccctcctcatccccctcccccaccccctcctcctcctcctcctccccctcctccttctctgcagggctccttgtggctgacctcagcgaatctccgaagcagcaggagggaggggcattggctaatcgggaccagacgcgccaggcacttcagaggctctgcaggccctgggttggaggaaatccaggcctctggagtggcccataaatcaggcagctgggcctgatgggggtcgccttttcatgcgacctgcctgggactgtggggagtgtgaggtggtcctgggggaacatgattgccgcacatgcttggctggcaccggccaccctggaccacagctgttaccactgtgagcctccagggcatctgtggacaagggcccagccagccaagggcaggctcaaggaatgtgggtggggtgactaagacaccccctccccgggataatgggcctcagcttcctcatctgagaaatgggcacgtttgagaaggctgcagtgccttttgtggccaacagggtggctgcattggagtccggtcttgcctggaatcccttgaggcaacatggccagccatcgagccagggactgcctggggccaggtttcgggtggtgggaaagttgggggctggtggaggacccctgtcgggtggtgttcggaaagccctaggtggtcacagccacagcagcgctgggctggtgctgtcctgggggttgcccgggctgggtgccctatagctgagacaccccttggggagggggtgcagacgcagagggcctggccccctccccagagagcaggacagacactggtcctgactctggccctgactgttgcagagtggtcccaaggaggggcaaggccagagcctggtggggtggtgagggacacgggtgggccccagagaggagtaagcctcttggtcgattccctcccagtgagctttgctctgtggcttgtctccttcttgctcctcctcctcttcctggaagatgtcactgcctccaggaagccttccctgactctgaggctgggtgaggcgcatcctcctctgggttcttctggctcttgtttttagccgtttctagaacccagtctcagggttctagagaaacctgtgtgtccccccagttcagggaagggggcagtcaccaaacagggtgcatcccagcgtacagctcagacctgggtgggggagctggtggagtgtgcggcggggggtggggccctgggctgtacccgatcctgcggctcttgcgccccttcggtgagctcatgtgccctctaggagcgtctccgagggaggccttcgcttctgttgacacctttacagcagcactgatttgattttccacctgccccaccggggctggagacctgaagaggaagggagagggtctcctgcccctggctctgccttgagtgagtgtgggtgagggaggccctcgtggctctgaagagacgttgcttttaaggggccctgcttcttgccagtctcctgcgtgtccccggccaggcggccttagctgacagtggtccggttgtccgggagccgcaaacctgccttgttagccgcaggccggggcgcttaatgacggctggggaaggtggacagttaacaaggacattgtgagcctcacgatgaagcccgatcattattttcctgctgggcttgtgtgggtgaaagtgtttgggcttattaatctgttacggatggtgcggtggccaggcgggagctcgcagcgtcatggacggtgagagtgctggtgggctctgggtgccggccctccctccccaggcactgaccctgcctttgtcccttgctgtcctcaggatccttgcctctctgccctgcttctcgacaagctaccagcacctggggccctgccagcctgtcgcccagaggccgagcgccgctgtgacgtctgcgccacacacctgcagcagctcacacgggaggccatgcacctgctgcaggcccctgccagccatgaggaccttgacgccccccatggaggccccagcctcgcaccccccagcaccacgaccagctcgagggacacgccaggaccagcgggtcctgcagggaggcagccaggacgagctgggccagacaggaccaaggggctggcctggtcccccgggcccagtgtccaggtgtctgtagcacctgcgggtcttggaggggcgctgagcacggtcaccatccaggcccagcagtgcctggagggcatgtggagtgtctcgcgggtcaacagcttcctcccgccggcgtgcctggtgagtgtcttgctcagcggatgggagctgctggcctccttgtcagaactgggcttccttcgggggtctctgtccacgttgagtgccctgcagtaaggcttccctgaagggaggggacggcgggcatgggggttcctgacactcctgaggccccacatcagatgcacccttgatggtgcacagcagctgttctcaggtccctgcctgactcagggaataccttctctgggagcacgtgcccctccctgtctgtcttttgagactggggctgagggcccaccagtgcccagcacagggcttggcgatgcacagggcaccgtgtgtagatcggggctcacgaggcagatggagtaggagggcccttgtggcagagcgagggcctgtgtggaggcctgggggtgtgaggcgtccatggacgtcgggcgggggaccggcagttgcaattgctggagatgcgttgcctgcccctgtggcaccctgggggcagagggacatgtgggtggctgtgaagagccgtgtttctgcctggtacactgtctagtcaccacacagcgaccagcacaagctcgcccttctcccttggtctccaggcctggtggtgtttccaggggcagacagaggtgcagagaccccgtagtctctggggcaacattggccactgatcctaaggccaggcagaccctgcccttgccttctgggctttcggcctccctgtgactggtgaggtggcctgtctggacatcaagatcctgccccagctgggggctggccttggcactagctgccctggcagtggctgctgggctggtccttctgaggctgctgggctgccctaggggtcgaggtacgccgaggctcactggaggaacttctggacaccccccgggtcccagctggtgtgatggttcccctgtggccttggcacctacacccttccacctgtgaactctgtggtgaggccgaggagagggagccccacccttgccacgaggtgcctcctggccccagagctgaaccccacccttgccatgaggtgcctcctggccccagagccgaaccccacccttgccatgaggtgcctcctggccccagagccgaaccccacccttgccacgaggtgcctcctggccccagagccgaaccccacccttgccatgaggtgcctcctggccccagagctgggcatcctgggaggggtgggcggggatggtgctgggggctgcagcaggtgagctgggcagcatcctggaggaggtctcattgagctgggcctgtgtggaagcatcaggggctgggcctgaaacccaggatggtgggcacaggcacctccgtctcctgctgtctccctgggccacttggcctcactgcaccctgcccgtggctgagggtcccagcgggtgggggtggagaagatcgcaggccccttgctgggcagccctgctggtggatggcacaccatgaacatttaggcaccctctcccagcgttatgtgcacattgatcgtggccagggtgggtgggaatggatttataattagacagcagtccgggcgatcgatagggagattattagaaccataaatagaactttaggattcagatgaggtaatttcccctgaaccagggcatcgatcattagcgtggccctggaatgttaatggtgcctgttagactctagagttaaatacttgtggagagatgcgctgcaaatctccaccacagaccgtcaaccacccctgggtcgaatgagattgttccaaggcaaacactgatctggggccagcgggtgggacgggggtgctgcagccccctctgttacacgatgtggagaggaggggcagggaccagccatggcactttggcctcggccgaggcttggcaggggatgctgaacgttactgggtctggccagaaggctggtccttggaggggtggtgggtggcccagggctcccagggcctcctgcggccacaggtggggcctggaacatcccacatcttgagcatccagagactcctgggctatggagccgccgggcagggctgtccagcggttcttcccggactgttgggccggggcagcgctgccgttgcagagggcagaagctgcccacggagcctggccctgtgcctgtgccccacgcctcctgccctgagagctctggacagtggtcatggggcccaccccagtgccctgcctgcaccaccagaggctgccatggtctgggacatgctgcgaaccgtggcccatttcacgctatgaactgagctgcgagaccgaggctctggccttcagagcccacagtgggttgcaagtggcaccgtggccctccacagaggggcggcccggtgggcagtgtggggtgctggaggtgttgacggtggccctgaggagcgggggtgcctccatacatggagattgggtggcaccggcttgggggctcctgccaccgctgtgctgggctgcaggggccctggagggtgtcccgtggtcctcacggctgagatgggccaggcaggggcagatctttgaactcagggctgtccaggccctagggccctttgagtgacgaggctggagcttcgcgtgggtgggcgagtccgccccatggggctctgcagggtggcgcacatccacacccgtgcaggggtgacactggtgacagagttcggctctgagcctccctggccgctcctcagcccctcctcctccctttctcccccacttctcagcacaaaatagcacccagtgaggtgtttatctggggggctggtgtctttcacgggccagaaccttacagatgcgtttgggcctggagggctcctaagaagagagttagcttggcatttcctaaactgtgctccacggaaccctggtgttccccgaggttgcaggtgctctctgctggccgcctggtgcctgctgtggttaggaagctccccgtggggtgggtcccgtgcggctatgcttggggcccttggctctgcgcccctcggcctcacgctcccctctctcctgcctttccttccgtttgctgctgtggcacctccatcacatgctctgtctggccgcccgccccccctctcttctgcccccgtgttgtggtcttccctctcgccgtcctcccctgcccccggctctcgctttgccagacggcttcttttggcatgcccgggctctgcttccggcaggaattggcagtggccgtcccggcggatggggcggtgtcccggcagcgcgtgggacggtggagccgaggcgcgtgccggactcctgagacaggtcagtgtggggaggcccagctggccgcaggcctgtaccgttgctgggcggggccggaaccttctggccggaggtggagtggctggcctgagatgggggagggctcgggccctgtgggaagagggtggaggggccgggtgggctgtggtgtagcagctctgtccctgctgcagcccctccagcctcggtgcccctgtccagtgggggaggcagggtgtcctggtgcctcactggacactgtgattgggcctggcccaggatgccaaatgtggccccacggtggtgccatcgcgacgagccacctgtgggtgccacgctggctgtgggtggtgcggccccggcccccaggagaactggccctgggtgctgactgccatgcccaggggtgctcaaccagacccggctctgctccaggggctcaggacctgctgttaatgttgtaactttaaagatcactctttcctgtctgctcagcaaaggagtttaggcttttgatagggagcacatacattaagtgataaaatagaattcacacttgaggtgagggagtggctgggagaaggagagggctggccgggctgggttcagagggatgtacaggagttcctggcctgcaggctgctggtggggtgtggtgtgctggcgcaatgtccagtgagctgttccaggtcccaggttcgcccttttctgctactgggcattccttctggaagccccggaggagtggctggtgcctagggcccagggggcacccagcttccatccagcctaagtcttggggctccctgtgaacttcctttcgcagacatggttctgttccaggtcccgggaggggcctggaagctggtaccggccatgggttgggcagggtgagccggccatgggttgggcagggtgagccctccatggtggtgaggagggatactgtctgggatggcagggcctctgtctggagtgtccctcctgggtcccggggcggcttgttctgctgacgtgccgtgcctggcctctggcctgtgccacttgggacaccctgaggacgctgggccttccagaccagcccacgtcccctcagcacggggaccccagtcctctgctagcctgggtacaaaggacgcctcgggcagtggttatcgactggacacttggggccgaatgacgcttggcacctgggtgaccgtgacctgaccaggccacggtgcccaagggggtccttggagagcttggggcactgggcccttggggaaggggccggggcgaggggtggccaggctgaagcaggctgccttccctgccttgcctggggttgcatccccccacgccgcccaggaccaggtttggcctgagggttcggggtcccacgtgtctgggaatggaacgtgcggaggtggagctcacgtttgctgggctgtcccgggcgtttaattacgtttgtgcttcattatgaggaggcctccctttctgggatttatttgagctaatgagttggaaatgccagggtagtatttcagatgagggagcgccacacatcaccgtacgtggggcaattagtgttcctgccaaatagttatcgtggtttcttctctaattacgccgctgggtgctcccaggaggctcaggggtgagagggtggggggtctgtgtccatcggtcttgaccagtgtggtcgctgcgattctggagtttgatgggggagaggcggaaagtctggcttctggaccaccatctgcctccctctctgcctccaaggagtcctgctggggcagaccgcccacacaccccgagctgggaacgtgacctcacggcccaggcaggccttccccactggcctctctgccagccctgatttctggggccttcccggcttcacaggctgggccctgggggtgcagagcccccaggaatgtgctgggctctggggtgcccaggcctgtctctcccactccgggtgccagggggcagtggtgtctctgcccttgcgttccttatacgcactctctccttccctccaggccgaggcagcggtggcggccgtggcggtggcagacacggtccgagaatgcccccccgtggccggccctgatggcttgtcgaaggcctggggccgtggtggagtctgcacgtcagccctggtcacccccaccccgggctcggtggggggctccacaggcccctcagctgcagcctccttcttcataaggtatgtcctggggcttcctgggcagccttgtgggcagggccccatggccccggctgtgggcccctggggacctatgggccgttcttgggggacctcgggcatgcttgctgctgagacgagtggatggggagctgctccgaccacagctgctgagccgctcacagcctgccggcctctcgggccccatgcccgatgttggggggcatctcatcctcgggggagcactgccaaggaggggctctgtggccaggaccctgcctgagttggagcctggtccctgcctcttctgagctgtgcaatcttgggcaaatcaactaacctctctgtgcctcagtttcctcccgtcagctgggctcttcctcataggagtcgctgtgactgcagcaagaaaatgtctgtgaagcctggagaatgtggcccggagtggggcagctcagctgtggacattgggggctgcccgggggaggcgcaggctggggccacggagaggacaaggctggccttcaggcagcacaaggggaggggcagcagggcttgagcgggtgcccacggtgccagccgggcttgtggttggcaggtccagctccaccaggagcatcccacattgggggaccatgtctgacatcacttggttgctttcccaggccccgagctcggggtgcctggtttctctgctctcccccctgctgatccccaccactgccagaatgccaggcctgaggccctgcaggcaccaggtccttgccgactggtggtgtggatggggtgggccaggcagagggaacaggagagcagaggtggggagggggagttggcatggaggggcgtggtgtgggagcctccactgggcccttcccggcagggcctttggtcctgggacccgtggcagagcctcctctcatcctgatggtgtaaggatgcggattacaggatgtaattgccataatgcctggtaatggcaggcccagccgcgggtcagtgtcccattagcagccccacgcgggtgctgataagcttgaacatgcatcacacccagcggccagagacgagggcgtcttatcagcgccggccctggggaccgtgtggtctgattgcagagtgacggggcatatgattagggcattgtcgcacgccgtgtgccgggctgagggctgatgagcacaccatcgcgttggagcacagccagaccgcgcacgtgaccagtgtggcctcagcgccaccccaattaggtgccgagagcacggctggctgggaccctggtgggagcagatgggggtcttgcccatcctgctctggggtcccccgtgtgtgggacagcccaccccgtcacaaccggcctagtcctgaattaaagggcctgtgcggctgttctgggcacagccctgtggccgtgctcctttgggtcctgtttggcaggaggatttgaaacgtggagacttccagaaaagaaagaatagctccagtgctcagagctcccccggtccctgatgctaagccccctggtgccaaggagggttcctgacactgggaagtaagggtagggtgtcggcccccaggccggtgcgttggtgacctggagcccagcagagcggccctggctgccttttgtttgggagccgaggccggtgccgcttgccagccgcgctgcctgctgaccttgggaagttaccatagaaaccagcgcatcgggctggggacccagaggcggttctcccaaggcgggggcgctgccggctgccattacttccagcctgttaggcaccctgggtctcagcggcttctgcgaggccactgcaggtggcaggtcgtggttcaggttgtggcgggggacatcctggcaggtgggccctgtcggtggatgcctgacgtgggctggggtcggtggtgggtgacctcctctgtggggctgcagtaccctgaaccctcaggggtgagatcagagggggtgtccactcctgggttttgtgggtgtggggctgtggctctgagtggggacgagtccaccaggagacagtggagcttcagcccccgccccaggggtcttgggcacgtgctgagggtaccttctgtgctcccacctccaccctcgaagaggacctgggagggagtggcactgaccccagcccctgctctgcccttgggaagtttccagtctggagggaccgaggggcacctctgtggaggcagccttagatggcagcacgggacccgtgtagcagtcagggcagagtggcctctcagggagcgggctttgagggttgagtaggagtctggcaggcagcattgccaagtggagacggaatggggtggaggtcaggagtttgagtttttgaatcccgtgggcctggggagtctcagctctgctgctgcccacaagcaccccccagccggattagggcaccagcctcaggctgccccctgatcctttcagtggcctctgggctccttatgtccacacagggaagctgggatgtggagtgatcccatgggtgcccgggtacccgagtttcgttaatgctaacaggggcatagatagagcaggggctgagccccatgccctcaccccctgggtggggcctggggaagctgcagggattgaggcagcgcagctgtgacagagcttggcatgctggcccagcaagtgttcgggagggtggggcgcgtgggccgggtggccccggggttaggagttctccgaaggctctggtgacccccagggttaggagttccctgaaggttctggcaactctgatgacgctgtctgaggccccgctggtttgtgccggcgctgggagcctctgcagtgcctcctctgaggtacttccgtcatcatactctcacctgctcgctgccatgctggtatgggggtcccctccaagaccccaaatcaaatgtctttgagaaaactgctaagggaggttgcttccattgggtggggagcacctcatggcacttgcaggtacccaggccccccactccccaccccactgtggcctcagcagagcccccgtgtcagcctggatgcccaggcccatggacggtcaggctggcacccagcagaagtgcagcgcctgcggggagagtgcgctgcccgaggcttagctggggacccacatggaaggcactgtctggagaggtgtccccacctgtcttctggcctgtgggtgaaaatccaggacacaggaagtgtggaccacagcagggctgggagttggaggggctgatgcctcagtctccagctgcctccagctggggtccagggtccccttcgcaggtctgcaggacccagctggggtcccccgatgcctgccctggttccttggtggggcaggtccggcaggtggcaggtgcccctggggtgaggtgggggtagggagggtggggctccgtccaccagcctcgcacggcccagtgtggaagctctgggttggccataagtgattcctgcacgcgacagaacaggctcgtgtgtctccttggggtaattaagggcctcaccatcaaggccaactgcctgtgaaattaccctcttgtttggaagcggtgatttttctctgtaaaaaggaaaatatttccttttctgttgacatgaatcgatggccagggccaatgagcccaggcaaggctgtgggattgcagcaagacacctggtggctctgggggccgttcaggtgcccgctgtctcgttcatcctcgctcacgcgtgttctgagcttcttctgtgagcatctgcccccagaccccctgctggcagggacatagctgtgtaaactggtgtctcacggcagggggtagttgctatagaagcaggaggcgcaggggctggggacacccatctcagggcatcagggcaggcttcctggaggaggtgtcctgtgaggatgggggctgtttatgcaggtgaagttcctgcttttctgagtcttcccttcagagtcaaacccctcagacttgcccactgagggccgccgctccctggcagtgttgggtgtgggcagtgtctgctgtggcctgggggagacaaaccccactgctcagaaagtaagttcctgcctccacagggccgtgggccctcaagggctgttgaacccaagcgtggtagccagatgggggctgctgtgtctgatggtcgtttccatgggggcctgaatttcatcaaaggagaaagtgctcgttctggggcctcgttaatgcagtggcaggtctttgagtcataccagtgaggtaagcccgtaaaagcaggcaccgggagggcccagcaggctggggtgcagcctgttggcgatgggccccaggaggaggaggcgcctcaagttaggtcagattgtggggtggagatgtggggcgaacaaccttccagacttccagggctgatggaaccacagaggacgcccggtcccagcctctgtctaggcggcctgggccctgggtgtgcccgctgtggcccaggcatacctgagatctgtgctgcggacgctgctcctgggagggtcactggaggggcagagcccttgtgtggccgacggggcaaagggccagcctggttttggcctctgcagacctaaggctccagcctcaatctccctctggcctctccaagtgctgctccagtctccagtgcttgcccggcctccgcgtcccctggaagcttgggggtgtgggtgccgatgccctattgcccacagccttgggttgcagctggtaccttgaccctgcccagccttgggaggggctgcaggggagggtggaggagctggctctgggtgggcgtgacctctccccatccacttgaggccgagccaacaccctccagtgagggctggtgctgggcgtcccccacatccatttccagaggaggaaaggggtccagggaggctccctgtcccttataggggccaccgtggggaccgtcctcagccctgcctgtccaggtagggtggggggcttcccacctgcacctgcagggccctgcccttccccccgccccgccccaagaaacctggggtcccagccttggagcagcaccaggcagcagggtggggtagccctgtcccagtcctgcctgctagatgcggatgttttccaaagcggggccgcagcttcttcccttgcaggcagctggcgggaagctgaggtgtaacccaaggtcgtggggtggggggtctggaacaggaggctgaggctggggtggtgggcaggcaggaagaaccccaagagcagacactggtgaaatccaagcctcctcccacctgtgcccccaaatgggcagatgcagccctgcctgcctgcctctggcctcgcccaggcccctgcccagtctccctgcccgctatgggggctcactttgaggtttgggttgtggctctgccctctgcgcttcccagcgttcccctctgcccgggcttcttgccctgtggacagacgcacagacacacagacagcgtgggcgagtgtgtcggcctccatcctgtccctgatctgctgtgtgagtgatctttgggcgacgagggcacaagggcctcttccttgcagggcagttgtgaggtttacagagacgaggcttaggcacggtattgggtaaatgctggcgatgctgggtgaggtccaggggtctcaggcacacaggcccgggccccacgatgcaggtgccattgcctccccttgcaggcctccctgccgcgttgggccccaccctgtgtggctcagctaccagagggtcacgaacctgggaccccagtgaccccggaaccccgagcatgcgcggcacggggcggccatgggccccgacccctgctctgactcacacctgcatcctggggcccaggcccgtgtgcctgagacccctggacctcacccggcatcgccagcatttacccaataccgtgccagctgtgggcaaggaacccaagtccccgaggcggcgggtgggcttcccacacctggaactaccggggcttctcctgggtagccgtgggtttggttcctgggattcttcctcctggcatcccccggctccacgtcttgcctgggtggctgcaggcaccgcccaccactgccctactaaggactccaccatgtgtcatagattacttttactttccacgatgacacctcactaggaggaaagccgtccctggggtctcttaagagacagctcctattcaaaatgaaagaaattaagcaaaacgccagcgctgcagccgccgcagtgggggcagcgagaggccgggcccggctctggggtgcaggtccttccacactggggtcagttttagggagtcaagatagacgtgagaggccgagggctgtggggggggcgtggggcatgttaggggacagaggagcccagggtgggtcgggggagcgccggtggtcagcgttcaccacacccttcgccgggtggcatcctggcctctggcccgcgtgggagcgcctcctgttgggaggtggtgacacccagtgtgtgtgttcgttcacccctgtggcgtcctggtgtccctgtgctggtgggtccatgatccggggtaggggctctgggtgcctgcagcacaaaatgtgctgggagggtgtggggccctgcagaggtggggtgggtgggccacagagaagccaccccagggaatgagtaggtgtggcccagtgatgggacctgggaacacatccccagcagcagggttagcacagccagggctcagaggcgcggcgggcctgtactctgtgtgtgtgcctgtctgcgtgtgtatgtgtgtgctctgtgtgtgtatgtgtgtgagtgtgtgtgcgtgtctgtgtgtgtgcgcgtgtctgtgtgtgtgcgcgtgtctgtgtgtgcatctctgtgtgtgtgtctgcatttctctttctctgtgtatccttgtctctgtgtgagtgtctgagtatgtgtgtgtgtctctgagtgtctgtgtgcctgtgtctctctgtatatgtgtctctgtgtctttatgtgtctgtctctgtgtgtgtctctatgtctctccgtgtttctgtatgcatatgtgtctctatgtgtgcgtctctgtgtgtgtttctgtatgcgtgcacgtgtctctgggtgtgcctctgtgtgtgtctgtatgtgtatgtgtgtctgtgtgtctctgtgtttctgtatgcatgtgtgtgtttctatgtgtgtgtgtctctgtgtgtgtgtctctgcatgtatatgtctctgtgtgtttctgtatgcatgtgtgtatctctatgcatgtgtctgtgtttctgtatgcatgtgtgtgtctgtgtctctgcatgtgtttctgtgtgcatgtgtgtctctgtctccatatgcatgtgtgtgtctgtatctctatgcatgtgtgtgtctctgtatgcatgtgtgtctgtgtgtctctatgcatgtgtgcgtctgtgtgtctgtatcatgtgtgcgtctgtgtgtccctgtgtgcatgtgtctctgtgtctgtatgcatatgtgttctgtgtgtctctgtatgcgtgtgtgtctgtctctgtgtgtgtttctgtatgcgtgtgtgtgtgggcctctgtgtatgtttccatgtgcatgtgtgtctgtgtgtctctgtatgcatgtgtgtatctttgtgtctatgcgtgtgtgtgtgtctgtgtgtttctgtatgcatgtgtgtgtctgtgtgtctatgcatgtgtgtgtctctgtctctgtatgcatgtgtgtgtctgtgtttctgtatgcatgtgtgtgtatctgtgtttctgtatgcatatgtgtgactgtgtgtctctgtctctgtgcatatgtgtgtctgtgtgtttctgtatgcatatgtgtgtctgtgtttctgtatgcatgtgtgtgactgtgtctctgtgtctctgtgtgcatatgtgtgtctgtgtgtttctgtgtgcatgtgtgtgtttctgtgtgtgtctgtgtgtgtctctgtagggtgtgcgtgtcgaggtcccctgggagtccaccccagtggctcccaagcatgcactggcctcccctggagggtgtgttaaacccaagcgtcagcctctcccctggaggtcctgtggtccgggggctttgggagactctgcaccttctgggagttccctgggggcactgtgggtgcaggaatcccccacccctggcggtgctggggcaaggctgagcctcagggtgggctttggggtggggaggcgctcgccctggctgaggggcagggtggcagcgggggcacttcccagcagccctgagtgacgagggtggcaggggcccaggagctgggcagtggctccaggatggctctagggccttggtgatcggcaaggggcaaggcagcctcacctggggcctggggcttggggtgtggtaatctcgacagcaggattaattgagcccttcctgtatgtggtcactgtgctgggtgccttgagtgtgtcagtccattagggccacacagaggcctccattgtcacctcatccgactttggagatgtagaaactgaggcataggcaggccaggtggatgtgcccaggtcacagctgtgcatggctgcccacagcctgggcatcgggtgggagcagctttcactgtccgacccccggcagcggctgcaggtgggggatgagggcacaccccttggtggggggatggcattcagtgcagagcacagggaggggcgctcagcctgtgtgggtctggaccctgtcacaagcttggtgtgaatgctgggcagagtccctggggcagggacgccatggaggccccagcctgaaccgtccactgtagaaatgaagtgcaggcctcccagccacattttggactgggtttcctgggatggtggctgatgaagtcccagggtgggatcgcctggtgactcgcaggcgggtgacaggaacagctgctgtcacccaccactgatcctgcctctgcctctcctccccagggctatgcagaagctcagcctggcctccaagaggaagaagccccacccgccaccgcctccagccacccgcggcacctccacctaccccaccgacttcagcggggtcctgcagctgtggccgcccccggcgcccccctgcctgctcagggccgcctccaagaccaaggacaaccctggcagcatcgggaaggtagacgcagccccgagttcggggccctgggtggggaggccagaggcgtctgagaagacgcaggaggggtgagggagtggaggggctgccacttccttctctgggttggataagggtggtcagtggggtgccatggggagactgaggcccaggtggcagcagggagcctgggagcctgtgctgggctgggactgccgggatgggaggggagtggcgtgtcctaggggtcccaggggcatgtactaggttcagcgtggggcgggacagccaggtcacggggctcccagggactaaggttgggtttgatccagggaagccccttgcgtaggctccactgagacgcagccctgagggggctgggggcaggaggggactctctgctctccagagtcaccgtgtgcaggcgggcccctgccatgggaaagcgggatgcgtgatgggttgattctggcgccgcgctccacatgggaagactgccgcctgtggagggcacagggcctccatcagtgatgggacaggctggctcctggctgtccctggagctctgagcctggggcctgtggcttgctggttgtgccatccgagtctcggagaaatacctgccctggctggacgtggccctgccttgtgctgggagctggcagtgcctggttcgtgggcccattgagtcaggtgggctctttgtgcccatggagggtgggaagccagtcacacagctctgtgtgtgcccccggtggctttttcctgcccctcggcctgctctgcagccagccccctcccgcccagcaccccgaaagcactgcctggtgcctccaggcccgggaggctctgtgccccacatgggccatcaggctccgtgcccctctggacttggaccacgattcccaggggttcagctctccaggggacaaggtctggaggggacgctgtgcccacgttggagaccccctggcagaaggcccctgtccctgggcctgggggtgccacaggcctctcccactgccctagctgtactgggtctagggtgccaggagcacccctcgcagtcctggtgagagcctgcttgacctttacagctctgtagtcctggaggggcctcctgggcagccacaccttgggattttgttagagctcgggaggtgccaggctcgtgggagggtttggaacatgctggctacggggaagggctgtaagtgactgtgtgtctggccacgccctcagtggtgcagttgctgggggctgtgccccctgcccgcccggtgatgtagcgagcattgtacttgcagcccctggaacgctaatttcgtgacttgagccctccaacctctccagggcagccctggcctgaattgacggtggctactggtctggggcagtggtgggtccctagggagggccgccgtggggcataggggctctggggcggcctgtggggcagacctgacagctcttaccatcttcataggccatggcgggtccgggtgggggcatcaggcagttggcaccttggagctgcatgggtgtccagaggggagtgtgtggtgagaccaccaggagcctcccgatctccctgactctgggtctccaccccgagcaccccaccagttgccagggtttgaatggatcgcttgtccctctgggcactggtttccgtttgtggtaaggagggcttggcgggcatctggcatctctgtcctccggaggcgacattctgcatccaaggcccgggggcaggggaagctgtgtggcctggatcagggacttgtcattgctccgctggggttggggcaaggcccctgcctggggtgaggcgggggtggtgggtgaagcagagttgggggactaggccgggggtcactgcctccctggaaatctctttgcctagcactgctgggggtctgcggggaacaagggggctcctgatctctgtgcgtgtgcccggcacgggctgtttctccacagtcccctgggatgcgaggccagtggcatcagcctgtgttttgggcccaggcctggctggctggggcaccctgggtcctccccaccctcaacagtctccttgagacagggcaggtgggtgctggggccaggctgccgctgccctggccacgtgggctgcagagctgtgccgagagctcaggaggacgccgaggtcaggtgtgggcggtggtgggcaggcagcatccaggttccccgcccagcctgggatcggggccctggctctggcctgggcctggcactcagcctgtttgtgccatccagttggggcggggggcagaggagtcagcagctccttcaggagcccgcaacacttttcccagcgccccgcgtttcttaggggacagcttctgccccacttcctcctgggggcagccttggccgggcttctcccttctctccatggcagtcacacccccaccctgctccggagtgctcagtgcttccccagcaacaaggagccctgggtcaccagccttccagcccctccaccctgcacaccccccagctccccgggtgttattagcactaatgtcacatagtcagaaatgccgcctgaaaggcgtttaatattgtcacagaaaagaagttagattacgttcaatttctgacattaatgtgctacttaagataattcatcacagtgtggtataaaaaagacatccctgtctgggtgggtgctgagcagcgcccttccccctccctgcctgggctacctcttcagagctggaagcccttttttaatgcaaaatgtgttttttctctcccaggcagctattccgtggggctttgtaatatctgaacatttaggggagaggcttgctgtgccttttcctgcaaagaccctgtcatttccctgcagtaatgacagggttctctttcggcagacaatggcctgcgctgggaccagggcagtgtggggcaggctagatgggcggtgcccccactgtgggctgctccatcccctccctggggaggcccacaccccccttcctcctggttgtgagcccgctctgcgattaatgccgctggtggaaagggtggccggcagacgtagagagccaaaccgtgagcctctccacgccactccttcccgctaggaagtctctcaaatctgcagagcccatttggctcctgaagtggtgaggagttcacactggaaaaaaaattgccaaaaattaccgggaagtgcacgttttcgtctgctttgtggtggcgtctggaaatgaaatagttttgatcacgtcgtcgggggaataaaagaatcgattcttgcctaatggagcccaggttctgagtagtacaatagaaaagtgtttcttcatgctgctccccggagagcgggcactcccgactccagcggcttgcatatcaatgtgccccatgcccagggggagtaggtgccgcctggtgcgaactacccatggtaaaccaattttgccggcgttatgtatctgtcacttacaattaaatccgtgaaaaatattggctctgaaatgagtctcgggtaatttgatttacgctgtagtggagaaatcagagatttcagcgcagagtggactgtggtgtcctccagcaggaaatggggcctgtctctggctctgcgttggagccctggttcagggtggccctcgtgtgcgcagcctctgccgggtcagagccgccgcctcctggcatcgacgcaccagacccacctgtgtggggtgtccctgctgtggatgggtttcggagtgtttgcagtgattgctctgggctccggcatcctgggtcctgcccctccccggcgtctgccccctctcagggtactggggctggtgtcagggtcttcccgagtccggtgcctgtatgtggcccagtttgagatctgtgtgtgtgctttggagacgccattgcttctgcccagcaccagggctgcctggttccctgctggctcgggaggtcagtctggaagcccaacccaccctcagcctgccccccagcctcagtctccccaagcctgcagtggggccggtgaggccgaggcgtcagaatttgtatcttcccctggatgggatccttcttatcttgcccgtccccgtttgcattcgaatgggcttccccctgctttctgctgactctagtccggcaggccacagggtgccagggttcggttccctcagctggccagggtcggaggcagccatgcccctggatggctcccctgacagcgccagccctctgcggctctcacacctctgtggggcagttcattcccttatcttgcaagtgctccccctcagcctggggagcagcctgcgagggctgggccagggggccatgctcctccctcctgccctctcctggactgagctgctctgcaggacctgagcggctgtcctcttctcacggaggcgcccggagcccgccgccccctcattctctgtgccgcacattcggtgctgacaggctgtgcaccggccttgcctctccctggccctcaccttctccctgctctgctgacctcatatgggatctgctctcgcctggagcaggggcgcggtgtccacattcctgcggtgggggtgccagtgtgaggcctggcccgctgtccccacctgagctgggcccctcctgccctgtaattagtggccggctgggcggaggcagcttctcaggtgccgcccacctctgccccaggtgaaggttatgctgcggatctggcccgcacagggggcccagcgctcggccgaggccatgtccttcctgaaggtggaccctcggaagaagcaggtgatcctctacgatcccgccgccggtcccccaggcagcgcaggcccccggcgagccgccactgctgcagttcccaagatgtttgccttcgatgccgtcttcccccaggactccgagcaggtacgggcaggcggactgggcgtcctcccggagacccggagccgggctgctggctcagcacatgggtccgatctgcgcccgcttctccgtgcagggcgcagaggaagcgtgagcgaggggcccgctgcctgcggcgcctgcctgcttacctccctcatcgtcctggccagcgtccttgggtgtctccatccgcccctgccgaggctctgggccaagtccacagggaaaggcctggttttccggagcccgccctcccgggaagctttccgagcagctgttgggctctgggctctgggggcgcccggtgctccctgcccatgctgagccgtgcaccgtgtggctgcgtgtgcgtctctctgcgcgtggtggtctgcccctgcgcccggcggctggacttctgggctttgcgggtgtgtgtctgcacgtgtctggccagtccctcctacgtgtgtcctgggtcctgttcatgtgtgttctgtgctttccgtgtgcacatgggatctgtccttggtcccaggtgtgcagcccaatctccttgtgggtcgactgcctgcatgtgccaggacagaccggcctcaggcccacagacgtggcagaaggaaggggccacagccctgcctgattctcttgcccccctaggccgaagtctgctcggggaccgtggccgacgtgctccagtcggtggtcagtggggctgatggctgcattttttcctttggccacatgagcctgggtaagcacccttgccccaccctagatgggtcctgctggccaccccctcccatcctcatcacggtggttgctggcagcttctgatgggaaaggaggctggtcctacacatgggccgtggtgggcatatggggtgaggggcttgtggagaggaagctgaacccctgccgaactgaaaggcagagggcttaggatggatccaaagaggcccctgagatctcggtgcccctggttggcccccggggacgccagtagccataaaggctccttgcgtggtgtgtggtggggcctgacgcctgcgtggcccccaggcaagtcgtacaccatgatcgggaaggacagctcaccccagagcctgggcatcgtgccctgcgccatctcctggctcttcaggctcatcgaggagcgcagggagaggacgggcacccgcttctccgtccgggtctcagccgtggaggtgtgcgggcgcgaccagagcctgcgggacctgctggccgaggtggcccctggcagcctccaggacacccagtctccgggagtgtacctgcgggaggaccccgtgtgtggggcgcaggtgcgcctgcctactgtcccaccttgggggaggggggctgcacttggccctgagccactgaagacgccgctgcctctgcctttcctgcagctccagaaccaaagcgagctgcgggcacccacggccgagaaggcggctttctacctggatgcggccctggcggcccgcagcaccagccgagcgggctgtggcgaggacgcccgacgcagctcccacatgttgttcacgctgcacgtctaccagtaccgcatggagaagtgcggccggggaggaagtaggtgccacacccgcactcccgggcccctgtgggatgcgtgtcagcagagacccaggcacaggggcctgtcatccagtggctcctggggatgtccctggggttgtccccagcttgggcctggggtggggatgtggagcaggatctgggggcccctggctacaccatcatttgcttgccttgtggttccagtgtccggaggccgcagccgcctgcacctcatcgacctgggcagctgtgaggcggcggctggcagggccggggaggctgctgggggtcccctgtgtctgtccctgtcggccctgggcagcgtcatcttggccctggtcaacggagccaagcatgtgccgtatcggtgagtgtagggcctgggcaggtgccgaccagggtggccccttggtgacctggtaaatccgtgtctggtgtgcccggtgctgctgtggcccccagctcctcagggctttgctcctccaccacctgacaggcctcgctgcccgtgggctgcctggggccccacgctgggctggtgccggagctgggtgggaaccagactgatcccagggctgcccttggccagcctgtccccgaagctcccttcccaaggccttggcatctgaaccgcctcgacccgcagggaccacaggctcaccatgctgctgcgtgaatccctggccaccgctggctgccgcaccaccatgatcgcccacgtgtcggatgcgccagcccagcacgcagagacactcagcaccgtgcagctcgccgcccgcatccaccgcctgcgcaggaagaaggccaaggtgctccccacctcctgcccgccccatctcggggccgtctcggctcctgtgtccactgcaggcctctgctggcctggttggggtgggggtcagcaggtggcctggagcctgggtagatgtcctatgtgttctgatgtcatgaggctatgcccatgtggccctccctggggggtggggagcccagcctgaggtccctggctgcagtgggcagaatcggggcttgctgtatgtggcttgtggtggcctcactccagcctgctgcccccgcacaggccctggggtgctcaggagagccgcaccacctctgcaggggcttcctagggacccctctctggggctggagggtggagtttggggcactctggggttacacggcccttggtgtgagtcctggccactggcctgggcacacatgcttgtcttttgagcttcccgttccctcccagcgcggggtgacaccgttttccttgtaaagttgctaagaatggtcacttaagttcttcccctgagactcagttccgctcccagcgtttggtgggacatggttggtggtgcctgctgtagttttcatcacagtgaccgcagcattggccctgtgctctggggagggtcggggaagcgggggcgtgtaggggagactgggctcggcagctccacttttcttcccccagtacgcctccagctcctctggcggggagagctcctgtgaggaaggccgggcccgtcggcccccgcacctgcggcccttccacccacgcactgtggccctggaccccgaccgcacgcctccctgcctgcccggtgaccccgattactcctccagcagcgagcagtcctgtgacacggtcatctacgtggggcccggtggggcggcgctgtcagaccgggagctcaccgacaacgaaggtccgcctgacttcgtgcccatcatccctgccctgagccgccaccggccctccaagggtccccgagacgcagaccacttccgctgcagcaccttcgcggagctgcaggagcggctggaatgcatggacggcaacgagggtccctcaggaggtccaggtggcaccgacggagctcaggccagccccgcccgagggggccggaagccctcgccaccagaggctgcatcccccaggaaggccgtgggcaccccgatggctgccagcacccctcgaggcagttctggtccagacacccaccagggtacccctgagccctgcaaggccattgtctggggtgaccagagagaggacagcagcgcttggcctgagctgctggtcccggaaaaggctgcagtgagtggaggcaggaggccactgcccagcccggctcccccacctcctcagttgctggaagcctgcagagccccagaagagcctgggggagggggcactgatggagtggcacggacccctcccgtgggcatgagtgggcaggtggctgggtccccgatgcttcctggggccacctgcccccgcctggctgctggcagtcgctgtccggagcggggcctgctcaccaccacagtgaccctgcagcggccagtggagctcaacggcgaggacgagctggtgttcacggtggtggaggagctgtccctgggggcgcttgccggagctgggcggcccaccagcctggctagcttcgacagtgactgctccctgcgggccctggcctcggggtcccggccagtcagcatcatcagcagcatcaatgatgagtttgacgcctacacctctcaggcccctgagggggggcccctggagggggcagcctgggccggcagcagtcacggctcctccatcagctcctggctcagcgaggtcagcgtctgcactgccgacagccgtgaccccacgccgcagccccgcttcagccccgactcgctggcagggcttgaccctgggggcccccctgccctggatggttccctgggggatggaagctctgggttcctggggccagacagacctgacagtcctgggccaacctggggtccgtgccctggggaagtggctgcagtggccccatcccgacccggcagggagccccaggccgggccctcgcggtgggcatccgcagcccagaccatccactccagcctcccccggaaaccgaggactgcctctgccaccacccgtgtgggctgtgctcgcctgggccagagcccacctggccgtggaggcctgtttgaggacccatggctgctccgggtaggggagtgtgatacccaggcagcttctgctggcagggcccccagccccacacttggctccccccggctgcctgaggcccaggtgatgctagcctgtgcccagagagtggtggacgggtgtgaggtggcagccagggcggcccgcaggccagaggctgtggctcggatcccaccgctgcggaggggtgccaccacgctgggtgtgacaacgccagctgtgtcctggggagatgctcccacggaggtggtggcctgctcggggagcctgaaggcctcccccaccagcaagaagggtctggctcccaaggcgggcttcctcccgaggcccagtggggcggcccccccggccccacccacgcggaagtccagcctggagcagaggagcagcccggcctcggcccctccgcatgctgtgaacccggcgcgggtcggggctgctgctgtccttcgaggggaggaggagcccagacccagcagccgggctgaccactctgtccccagggccacgtccagcctgaaggcccgggccagcaaggtagaagcagcacaccgtcttgccggacacgcgtctctggagcggtacgaaggcctggcgcacagcagcagcaagggccgggaagcccctgggcggcctccccgggctgtacccaagctgggtgtgccaccctccagccccacacacggtccagctcccgcctgtaggagcggcgcagccaaggctgtgggggcccccaagccccctgttggtggaggcaagggccgtggcctagtggctggtgggtcgcgggctctggggccttcggtgaagctgtctacggcctctgtgacgggcaggagccctggcggccctgtggccggtcccagagcagccccacgggccgggcccagtgtcggggcgaaggctggccggggtaccgtcatgggcacaaagcaggcgctccgggctgctcacagccgcgtccatgagctgtcagccagtggagccccgggccgaggtggctcctcgtggggctcggcggactcagacagcggccatgacagcggcgtgaacgtgggggaggagcggccacccacgggcccggccctgccctccccctacagcaaggtgaccgccccacggcggccccagcgctacagcagcggccatggcagcgacaacagcagcgtgctgagtggagagctgccgcccgccatgggccgcaccgcccttttccaccacagcggtggcagcagtggctatgagagcctgcggcgcgacagcgaggccaccggcagcgcctcctccgcccctgactccatgagcgagagtggggctgcctccccaggcgcccgcacccgcagcctcaagtcccccaagaagagggccacaggtgggtgcagaggtgcacagccctctacagtttacgggctttctgtgtgtagatgtgcacagccctctacagtttacagggccaggagatgctggacagatgggcacagccttcaaggtcccagacccacacagccgtggacggtttacagactcgcctggggctttttgtgtgtggaggtgcacggccctctgcagtttataaaccccctgtacttgcccttctctggccccaccctgccctggggggctgatcctggtctgtgtctgggtgagcacaagggcagccctgcacaggtcgccaggctggggcactggactcgggtttgggtcccgggcctcgtgcctccctggcgagtgtcgagctgcctggaaggcccccgccagggctgccccaagggacagaactgctcaggtcatggcagggaaagtgggaggccctggtggtggtgggggcgcccttgagagctgtgggcctggcttggggtcggcttcctccctgccctgggcagagcgccagcctgaggattcctggactggatcccgaaggcctccctgtcaggactcgggccggctccgcagcgtccccgcaggggctgtgcttgggctgggccccgcctctgttcaccctgtgcccggctctccgttccaggtctgcagcggcggcgcctgattcccgccccactgcccgacaccactgccctgggccgtaagcccagcctccccgggcagtgggtggacctgcccccgcccctggctggctccctgaaggagccgttcgagatcaaggtgtacgagatcgatgacgtggagcgccttcagcggccccgccccaccccgagggaggcccccacccaggtagggcctttggtgggctggggtctatgacccctggtggggagcctgccgcggatggcagagtgagccatttgatgggctcgccaggcctctgggggtgtggctgggcagcccctgacctcactttctgtccacgttcctcccaggacgcaaaggtaggagcggccctgcccagcccaagcctgttgcagctccgacactccccttgggcagtgggtgggtggctggggggtcctgaggccactgctgctgtccgctggaattctcccctgtcgtggggagggtggtcctagagccgagccaggacccagacgggcatgggtgggctgccccaggtccgccccctgcccgcccttggagccccactgtgtgcctgccaaggcctggcaggtgaagggaggcgggggccacatcagggctgcttgggggtctctggggagagggtcccatgcctgagcccccgcccgccctgcctcccagggtctggcgtgcgtcagtacaaggctgcggctggcggagcgcaggcagcagcggctgcgggaggtgcaggccaagcacaagcacctgtgtgaggagctggccgagacccagggccggctgatgctggagcctggccgctggctggagcagtgtgagtcccgcccgcccacggacccagcccggcccaccgtgtgccctgacagctgccctcccctcccagagccctgttgctctcctgtacctcgtggtgggaaggctggaaggcagggtcggccgggccaagatgcctttcctggggcctctggggggccaggtggctgcccccagcctcgggcctgacgcaggtgcccctcccctctcctcccctccccagttgaggtggacccggagctggagcccgagtcggccgagtacctggcggccctggagcgagccacggcggccctggagcagtgcgtgaacctgtgcaaggcgcacgtcatgatggtcacctgcttcgacatcagcgttgcagccagtgctgccatcccggggccgcaggaggtggacgtctgaggctgggcgccggacaagaggagggggcgtgcagcgggctggaggacgggacgtgggacggagcgaggatgtggtgggggctgcggggggaggatgcggaggggtttctgtgcaggacgggagtctcagagaggagacggagtgtgggggagggagggccggccacgcggtggacagagcgagggtgccagggtgaccagaagaccgtcaccacccgacagcaacgcaagtgcctttgaccttgatttggacttttctcccttttgcatttggtgctacagacttgagacaccagcagaagttgtgttcagcccggccccgctgcgcctgtccgggccggggctggcgccggttgtgtttgtgtccaccttgccttctttgcagccaagcagtttttgtggagtggagtgggacttacctgcacgccccaggggtctttcaggattcaggatgacttttcttttacaatggtttcctctcggcagagcccgggttgtgggggatctgtgtggggttctcaacgcagatccatcctggggtctcccgggcagggatggctgacctcgagtcccctcccttcccgagaacccgctctgtcccgagggcagctaacaagggctgagccccaggtacaggttgcctcttccacggcaggaatttttaccaaaaccacaagcaaaaaacaaaacagaccaccacgaccaacaacaaagatggggggtagggttttgtaaaggttctgttaggttcatatttttatatcattttgcccataaatgcggaatttgccgtgggaatttgaagacaaatgatctatgtttttatggttttctagggaaggtgttctgggggccgggctctctccagctgtgggaggcctgctccctctggggggcaccctgggcagggtgggggggccttgggaggcgcttcttgccaaatgcagacgaggggtgagcctgccagcgtttgcgacgtccccgcacgacaggctcatactttctgaggatcgtgcatagcataggacgtctgaacctttgtacaaatgtgtagatgacatcttgctacagcttttatttgtgaattaaagatgcatcgatggttcccacggctgccgagttcactgggcgtcggcagactcctcacgccctggtgtgccgccctctgagggtccctggggtgacgggcagtaagcgtgggaaggacacatccacggggacccagggcttcgggtgctgtgccagggcctgccttgcagcccctgtggggcccacggtgccatgagggcccttcagagaaggtggaacacgacagagctgggattcaagcccacgcttcctttctgatctgctttcttgttgactctgctgagatcttagggtcccgaggctggggcagggagccaggcttgggggctgggctggcgggaaacagccctgtgtaagcggcccctggctcccttgtctctgggttatgctgtgtggggaagtcgaggcaggagtgatggcagcatttccctcccagagtcttcttgccatcctctgccctctgcctacctttgctcatgggctcaggacccccgaaccacaagagccccctcccggggcagcctggatggaggctcttccctggaggactcaggcctgggtctgtcttgaccccagtttgctgggctttcccgtggtcagaggccccagaccctttgggggatccccagccctttgactgctgtgagctcatggcctcacctgacctgtacatgtgccctctggggccaccttagctgttgctctggttgcctcctggcctcttcggagtcctatctgcttctcatttggtaggtccccagcggaactagtttgcttccttaagcctgttactctgtccccatgccagtaccccccgcctgcctggcctgcgaaggttgtgtctgggcacctgcccctttctgcggctttgcactggcttccagctgctccactccaccttcaacccgaggtcctggccatgaggccccaccatcccccgtgctgtgatcccctgcccagaggctggctgtgcagcccctccctcccttggggactccccctgtccccggctaggtgcccctccctggctccaggcgggggatggtggggcccctccttggtggaggctcctaggcctctctgccatggcacgtcacaccttgtgcggtctctgcctgtctcccggcctggcggggtctgagtcatcaccttccccgatcctgggcacagggataggcccagcagggctgaggagacactggctgaagaaggaataaaagaatacgtgaatgacagcatccccttaaagaggctccggctgcggtggaagcaggtccaggacagctctgagccgtctgcagagagcctcccgccggccctgcactgtggtcccacacagacacagtccttcgtgtggccacagggccccccaggtcaggccacagggtcacccgcacccaggcccctagtgtccatcgcaggtggcccttgggactccagcctctgggattggggttgcaggccagcctgggaggctgctggggcccctgatcctccagccccagccctgcttttgttgg

SEQ ID NO: 305 - DNA, 551141 bp, Homo sapiens
  source 1..551141: mol_type = genomic DNA
aaattggaagtgggaacgtaacggaaacgtccactctgttcttgccatcttccttttgacctttttacctcgctttggtggctgtgaaatattcccgcgcaggagctggagcggggaggagtggggcagagcacgggaggcacagaagaaattgtccccgaggaaggcagagtgggggcgtggccccaggcttccagaaccccgaacctttgtcttcttgccccctcctgcgtcgtccacagctcagaaggaagtcagcgaccagaaagccctgaacgtccttcgcgccctcgcccacccccgggctgggtctccccgcgggcgcggagatgccgttacaccccacgtgatccctgcgcccggccagtccttccagaggcgtctcgcggggtgttaattaaaggtcacaacaaaacagacctgctggctcaccagaagaaatgtcctcccgtgaaatgaaaaatgacaccccagagcagccacgtgtggagcctggcatacgccggcttcctgcgctcctgggcgctgcgccgggggactggggcggggggcgatcggagagggagcgatgacggggtgctccggagaccccgcggggcccaggcgcaggaagaaacgggcggcggggggcgaggggcccgatcccacgcaaggagaggccaaggccagctcgcgccacaccccctctccaggccagagtcgtccgcgtgcagcgcggcgaagccctcagtttcccctgcccggcagcggcccgctgggtcaccaggctcacctgtcccagccccgggcggcttagtccatcacagaccggggctcgggcgggcgggggaccaagggccctagtcctgcggctgcggtcggggagggtggccccccggccggcccggggtcggtagggcaattccagaaaaggtttgcccggcagctctccgagaacaaagggcggggggaggacccggcatgtttgtggacttgtttgtgactcaatcccttttgcacggcgtttcacagacagacctgcaagccttgtcaggaagagaaagaacttgggggcgggggaggctggggcaccgcatttccgtccagccacgctcgctcgcgcggcccccgggctccaggctcgcgcagcggcgtttcattagagccccgggcccgggccgcgcgccaggaacttccccgcacgcggcgagatcgacgatcccccgcccccagccccagcccggctccaggcctcgcaatgtcaggcacgagcgccgccacataaaatggatcccggccggcgcggcgagggcggcaggttcccgaggctcctccgcgctgcgcccgggcgcacacgcgcgctgtgaccgccgaccgctcccgggccacgcggagccgcccctctcccggccctcgcgcaactgtcaggcgaaacgggccggcggatattggctcggcgacacgccgaggctcctccccgagtctggatctttatattttgggagaatttctttgaactcagttaccaagctcggtgaaggagacaagttcccacagctgactcggctcggctctcccaccttcccggcagcggccgcgagccctgattgtatccctcgctttcctcgtgggggagcacggactgacttggctgaagaaaatgccagttctgtggatgtggccgtgacaagaggacgtgcggctggaagaggcagaaggggacgaggaaaagcatgctttgaagagaagaataaaccagcgaccccaaccctttctgcaaattggtgctattacttgtgggatccatttgctttcattccctcccaccccaccgctgaagaaaccttgccctgagggctgagagccagccccctgcagccgggggacgcttctgggttggaggaccttctggatgtagcgtcggtggaacctttagatactctcctctggaaaagccaccatgaattcggtagctgggaataaagagaggcttgcggtctccaccaggggcaagaaatacggggtaagttgtgacggtacgacgcggagacgcgttaccagacccatctcggcggaggtccccctttccccgggatcgtgcggccccggccccgagctctcccccgctgcagaggcgcccccggggctggcggggttgtgagtgcgcggaggcgggtcggccgcggggacgcccgcacgctcgcctcgctctcggaattttttcagccctctcgttccttcctttccacgcacccgtaacttttgccgcattcctgcacttctaggcagagtgaagccgaaggggagggtttcccatgaatgctgggcagtacctcggatcgtttagctggagccgtgagagcctctcgtttacctgcaggatccggagagttggaccccgtatgaataaaaatcctgaaatcacagccctccccctaccccccccatagggtcttccaggattttgttcccgggatcttgctgggataggtgccggcttcaaaagcgtggggcgctgaacctatggatcccccccgccttgcagaagccgtggaaacggccccgagcgagtccccttcctgaccccaggaggaggccaccggggaccagcgcaggggtcacctgggcggtggggactcacttaaggacaattaacgagacagacggagggcaatttggccgcagggcttggagaggtccccaaccgactcccgtgggcggttcgagcgggtacttggtggcgcacgtatgacccagctcctgggcgctgcagcccgccgccttgcagcccctgacaccggcgtgtcttccccgcaggtgaatgaagtctgctcgcccaccaagcccgcagcgcccttctccccggaaagctggtaccggaaagcatacgaggagtcgcgcgccggcagccggcccactcctgagggcgcgggctcagcgctcggctcctcggggaccccgtctcccggctcgggcacctcgtccccgagctcgttcaccggctccccgggacccgcctcccccggcatcggcactagttcgccgggctccttgggcggctctccgggcttcggcacaggctccccgggctccggcagcggcggcggctcctcccccggctcggaccgcggcgtctggtgcgagaactgcaacgcccgcctggtggagctcaagaggcaggccctgaggttgctcctcccggggcccttcccgggcaaggtgagcgccgcgcggggctggctggggaggcgccgggagggcggggccgggccgccacccacagcagctgctcagcccgccgcgaccttgcgcgccggctccacgcgagagcccccggcggcgctggggatgctccacacctcacggggctctagcacgcggggcgacccatgccccttcctcagccaggccgcccggggggcaggaggaccgagtcccgagcgcgaaggggcgcccgtggccacaggcctcacggcccacgggggaggcccccaggtggtctctcctgccgccccctcccagctctccctggcggctgcaggctgcgctttcgatgtttctccccacccccacctgtgatcctttacaaaaatgtcagcgggagctgtaaaagcaagctgatgctcggagctggcatttcccactgcctgtttgtggtccatcctttccgcggttgcagaaacagaaacatactcgaaagccagcattttccccttctcagtctgtgtgtgtgtctgaggaagatccggaggcgggtggctcttcggagcagtgctccctcctggcctgctcctgcgccaagcacactggttcctccatagcaaccctgcccgcagtgtgtgactggcccgagcccccaggggatagcaatgcgattgtatttgcactgttgggtccaagtactatcaaatgatcatatttactcggccacttcaaagagtttttatcagtggttagagagcaatatcaaggaaatagagtggattgctgtagaggtttttgacactgttggttcaacgtcaatttctggtttattatttccgtgactttagaaatgaaatactgtgatttcgagtaggcgtttaggaatgactgcgtctgctggcccaacctgcgtatgcagatacacacgttgatgttttcataggcaagggttaaattcaacaaatgcccacagacgctgtgaaacttaaaatgggggaaatgaccaccaggagaattggttttatgaatgcagaacttatctcaagaataatgaactcgtggatggttgtcagtgtaccgtttttgtagtttgatacatctgccgtgacatcccaaggatacatctcaaggaatcaaaaagcttatttcgctcttgcgtgctagaccttccgatttaacaccgtttcttcattcacagatttatttgctctcgtgatccttcatcaatattcattgattttctactccatccgaggcactgtgtcaggcacagcaatgaaaataccaggtccattcatgcagtccttgtccacgtggagcttagattctagtggaggatacagataacaaccacaaaatgcacagttcacaatgtcttcacatttgtggagggaatgtagggtgctgtgaggttgttgaactggatgggagcatctgataaagatggaaggaccttggttcttaaagatctagtagctgatatttggcagtcctaatacgttacagcctaccaaattattttagacctttcttgaggacctattcttataataggcttattgtggctttgggtgttcctatatgcaaaggccgatcaaaatacactcttctcatttaaaaaaagaggaggggaaggaaaatctacagaggaaacaaatgttgaaactcatacgcatccatcatgttttatggagtcctgtgaccagctggaatcttgtttttatagaaacagcctggaacattcacttacagtgtcacgggaggcagctcaatatatttgccaattttatgtatgtgataaggtaaaactcttgttggtaaactgattgtattgtcagagtgaggtgatggccccagaagaaacactggatttgctgaacccccatgctctacaatgacttcgagtgatccaaggacatctagagaagacctggcagtcatgggggcagtcacaggggatcactttaagtgcatacgtgaatgtcacatagtaccacagtcgcctgagttttatatgtgaagcagcacagtaaagcgtgacatttggtgcaagggcatagacagggctcagccaggaagaaggatgctttgcatcagctcattgttagtaatgagatgtggggcctcaattttaactacaaaatttctgcaagcctttgtgaataataattgtgtgtgtgtgtgtgtgtgtgtgtgtgtgtggtgtgtgttttaagcatttgtaccttgcatttaggtacaatttccattatacctttagcatttgcaaccttatagccaaacagttgccatgttctctggtgtaccatggatggaggccatgtaacttggataagacttttcttcttcccggagcaatattaatgaacaaactgtggaccactgtagccctcaggcacagaaggagttaagtttcattagaacaagaggtgtcactgtgactccaacatgcagttcgctcagttcgctctgaagagtaagagtctggaagataaagacatgtttttgaggagtaattaacaaaaatcatctgtgtaatttgcttaagatgcttacctgcatttgggaaatattttcttaaatagagtgttaaattctactaggtggtattaaatgtctcctaggtagatatttaaaagtcaaaagcagaatagcacatccaggaaccttaatattttaggatggatttggttttggttcttcttcaccactgatttactttgtgacattgggtaaattagttttcctctctactttttaactttcctattaatatcctaaggaaaaaaatgaatgagactattaaaacgtcattaaaatgatccaaggtaaggtctgaaaagtgctttcattctttagagaaagatatgagggttgatgattattaatgagctaagattctgttagatttatgttttacagaatttaaggtttttcttataagatattactcctgtcagtttctaatttcatctgtatattttctaaacatgctgccatatgagttctcacactgtgcctgttggtaggtagcaagccctattgaatcccccgttctgtctttggaacagttggttaaggaggggaggtgaagtagtagagagcccattccgggtatctggttggttccaggagctagtgcctggctctggtggcctgagaagaaccatcttattctgagcactccaatggaggatagggcttcatggtagaaaatgacattatttgaacgtaacggagtgggtgatagtgttggctgaggtaggaaataggaggagacatggaattggatggagctcagagggaaggatgatcatgagtttggttttccatgcagcgagtctgagctttctggaaagagatggaggcagatttaataataaaacactttgtttttggctatctcaagactggcgtgtagaagtgacagctgtgagctcacatagctctgctgttgatactctgtattcatcctttccgatagcaacttacctggtgagtagacgtttgtgcttggtggcagattgtaaaacactcagattgacttttattaccttgatcagtacaaaaagtacttactgggtttatatcgtttctcttttggtgccggtgagtggaagtggtcggataaaagaatgtggacgtgtaaagtgttgagattttaagtgagaatggcccttttacccactgtagccttccagtgtgtgaatacaaaaccatttcatgtccaatggcaagagcatctttcctgctttgtacacagtcagggcactgagccagaaataggggccaaggaacgaattgctcaattttgggctagcctagatcattctgatatctgtgacagaacttttgaatggactgggcaagtcctacgaaacaacagcccaacgaaattccctggagtaagcagtaaagctccaggttggcaaaaggttatcagacatctgttcatttccatatcaataaaagaaaatcttttatgtaaaaaaaaaaaagtgcagaactatgttcctatctgattgtctctcagtcagatattctgagtccatttatgccccagaaatatcaggaagattagccagacatactgagaagggtggccaggaatcacagagatgaaagaaaggaatgcgtcataggggttaaaaacgccaaacgtggactctaaatagccggagaccaagtaagtctagacttgaggagatatagatatccccacatgcatatttctgtattttgccagctccaaaagaggggtatggaaaaataactagacgcaaaaagtcccccaaaagccatcataaaacattttatagataggataaaacagacattgcatttcgagtacttattaattataagggacttctagctgaaatcttctctttcttctaagaacatgtggctattttcaaaaagcttcatttgagtctttctcatatcagaagtattttagataaaggagcagttagtagataatagcagtcatgaaaaagtcctacagcatttatcatttgaaaatttctgaaacattttgggagtttataaaaacattcccaggagagacatgtgagcagtaatctctttttaaggcttagcaagctgtggaataatggcagttcattctaccagactattaattgtgaagcaacatggtcagtttttatagtgacttaattcactttgcaaaaatccctggcctgcaataattccttccacacccattgcagataggattactacattagaaatgtgatttttaaatggctgaggctggtagtttgtcagcatttggaaggattaagtcaattaaaatggaggcaacatcagttgccatttgttatttggcattatatcacagattgtaccatgagtgggccaacaatagcgatgatagtaataataataatatgtaataaatggctaacaacgattgtcctacataccacgaactacactgaaacacacacacacataatctcatatattaaaatgaagatgaacgtgattttttcttttttaccctggaattccaagtgcttgatgtggttaagatcatagaaggaagcatgaagaaaaaatatgcaaggaacagagaaatccaatcacactttcccctagaagctgttaagggtccctgtgagtagaactgactgagtgagaggcaccggctcgagatggttattatttttcctgggctcacagatgagaattttacttccagtgagtggggaggttgggggaaagtatgtgagactgtcaggttctgagttgaggaattgtcttggctggaatgcaaggggcggggggaaggaacctccttatatttacgtgcacccattggagaccctgttgtcatcccttcctgaacagaaaaccctgcccgagggccccgtcctgaccttctgcgaggaagagttcttcagccggccatttcagtgccccatcggcagggcggccagacctctgctctgttttgtcctcaaaaagattgcaaattggctggtgtctgggagggttcttggtcattttgcaggaatacaagacaaatttcctttttaccactctctgcagtcacaagctattcatcagcatcctttctttcctgtttctcgtctatggtgttattgtggcgaaggagcactgttgagaatgtgctcccaatcgctcttttatacctatagatgcacccatcagaaatatcttttttttttttttttttttttttttttgagacggagtctcgctctgttgcccaggctggagtacagtggcgtgatctcggctcactgcaacctctgcctcctggattcaagcaattctcctgcctcagcctcccgagtagctgggactacaggcgcccgccaccacgcccagctaatttttgtatttttagtagagatggggtttcaccatattggtcaggctagtctctatctcttgaccttgtgatccacccgccttggcctcccaaagtgctgggattacaggcagaaatatcttattttaaagtacattcgtgtagatgcaaaaggactggggatacacctgtattcctaatgtacttttgaaatatttgtcaagatatcaactcagtttgtatccatcattggcttaccattgcctttggaactgctccagagcctatctgagaaaattggaaatgagtgattgttaaaaagatgtttgtccacctccaggtctcaaagaactcacctatgttttcttctagtatttaaatagtgtcctttttaatatttagatctctaatccattgagagattattttggtgcaaaatgaaagatatagatcaaatttcatctttctctaaatgtctatccagttgtccccactttattaaaacattcttcttacttgcagacttcttcttgtgaaaaaaagaatttatctttctcacattaattgaagataccaccattgtcataaatcaaattttcagttgtatctggacctattacaggatcttctagaatgttctcactctgttgtccaggctgggttacagtggcacaatctcggctcactgcaacctccgcctcccaagttcaagcagttctcccgcctcagtctcacaagtagctggaaatacaggcacggaccaccatgcccagctaatttttgtattttcagtagaaatggggtttcaccatgttgtccaggctggtcttgaactcctgacctcaagtgatctgcctgccttggcctcccaaagtgctgggattccaggtgtgagccactgcgcttggcccacactattttaattatggaagctctgtagcatgttttcatgtttggcagggctagctctctctccctcaaatagtgcctttcttttctaggagtttccttgcctaactccaatttttttttttgttaggaccgtgttgaatgtatacattaacctgggggaatagttggcatctttatggtgttgaatctttcccaagaacatggaataccttttcatttgaacaagtctactttttagcaatttttaagagtttcttcatataggctttgcacatttcttgttaaactttttcttaggtattatagcttttgttgctattgtaaatggagtcttcactttcattatctcttttaattgataattatttatgtgaaggatattgatctacatgttttatatcccgtcgccttattaaattctactatattcactgatttttaaaaaattggtactcttggattttcaaaaaattttgtcttcttcaaatacagatatcattactctcttcctttgctatttttatgcctctaagtgttttctcttttttgttacattggctggtactcctgacacaatgttacataatagcgatatagtgggcatgtgtatatatttttttctattaagatgttggcttttggactgagatctgtctatattttttaaagttaagtaaatatccatcaattcctactttagtgttttattaggaatgggtattatattttgccaaatgtcttttcagtatttagagagagaatcatgcaatttttctccttagatttgttaatattgtgagttattattattgattttctaatagtgaaccatccttgtattcccataataaaccccacttggccacagtgcattttgaaagatatgcttctggatccaatttgctaatatttcatttattgtttttgctttgatattcatatgccaatgaacatttttgattcctgtttatgtgccagttctagtactatgccacattataatccaaataggaaaaatactaaaattcctgccctggagcaactcacagtctagtgtcagagacaggcaaggaacgtggcgaagcgtaagcgttccagccacaggaaacggcaggcataggccaggaaggggtgatgcgtgccccctacatatggggaactgaagtcgcacatggtcaccatacacagtatttgtatgagtgcgtgacaggctggaaaggaggcagatggaggatgaaaggccttgtaggctataggctggactttatcctgtaggacgtgggcagccattggagggcactcatgaagggagtgaaatgatcagatatgcatttaagaaagattgctggccaggcacggtggctcacgcctgtaatcccagaactttgggaggccaagacgggtggatcacctgaggtcaggagttcgagaccagcctggccaacatggtgaaaccccgtctctactaaaaatacaaaaattagccgggcgtggtggcccacacctgtaatctcagctactcggggctgaggcaggagaatcgcttgagcccgggaggcggaggttgtagtgagccaagatgatgccactgcactccagcgtgggtgacggtgcgagactccatctttaaaaaaaaaataaagattgctgtgagaatgagcaagaagatgggttggaagagtggtgtcaccgagaccagttgggaggccccttgcagtggcttgagtgaagaatgacacagactgaactagggtagtacagagggaagggagaggcagctccggcctgacacatatcatatgtagaaaacccgccatggggagctgctgagatacggggccagagggagaaaagatgatgcattctcccaggtttctggccagggaaagtgtgtgggtggtgctgccagttatggagatgaagaatacaggcagagaaggggttttgttattgtgagcccagtgttcgaggatggctgtggatgttaaattgattggggtctctagagcttgaggtggaatggtccaatgggctcctgttggcgctctagagcggcttctgaggtggagatatggatctgggggatgtcagcgtagagaaggtgatggaatccacagacggcatgagctctccacagatgtgtggggtgagacgacagacagctgaacatgaagtggtggagaccattgacatcgaagggaccagtggcctgaggagctaagaagacagaccaagaaggagggaccagaaaagagggatgaaaaaccaggagaagacagtgtcatgggaactgaggaaggagtgagcttcagggcataggggtgacaaaaggtctgatgccctggagaggtcaaggaagtaaggactgaggttttctttgaactggcaaggaggaggtcattggatgtctttgttggaagaatttctggtgccctggagaaagccaatggcattgtgtccaggaatagattgagaggtgaggacatctcaggcagcatttgagttgctgaggacactgagatacaagagatccacttcttgaggctcttattatcttaaaatgaagaactacaatcaacagacttgcgtgcaaaaccaggctccgtcacttagggtgtgaccttgggcaagccttggtctttctaaacgtggttattctcatctctacagtgggagtcatgacagagccccaccaggaggatcgtgaggattaggtgaaattgtgagatgctagtcaaccatcgctttctgttattattccagtgactttccacaggaagttgaattttatataagattcctaccctccttccttccctccttccttccctctttccttccttttttccttccttccttccatctgacacgaaaatggagaaacagcagtcagagaaaatgaaagcattcagtgcgtctttgtttcttcacctccaagtggataaagcatctcattcttatttattcatttgtagagttgtcaccacagaaagtttaagggagctcagtggatgtaaatagcgactcctttgggttgaggtgccatgaatatggattgagagttttttgtcacagatggaaatcccttctttaagcccggcccctctcgtagcccctccagggagacttgcagatgtggcatttggcatttcggctccggggaatgagggagagcagatttcctccagtgactgcgcatgcgatgtgcagatctgagccgcaccaggaatttgggcttatctgccttccaatccagctttatctgtctcagacggttttctttgcagttgtactttgctgatcctatcacatcgattccaaccagaccccatgggaagtctgggaataaagaagtcaccctcccccaccaagcaggatatcctgcacatacatcagctctcagggctggaggtgaccgtggaggagagggatcctgtgagctctaatacaaaaaaccgagacattctgaacgttgctatagaggttagcaaagcagaaggctctgagggtagagtaagtattattaattttttaaatatgcagaacgataaatatgtcttaagtgttatagaccaggttacagctgagggactattttgattttccttttctacttattggagtttacgttcaatactgttgccaaccacaaaaagttattggaacaaattttagctctccacacagcatggttctaaaatctttgatggttcttacgtgtaaactttctttttatataattgtttttttttttgcttgaaagcatgagctgcaaataataaattaaaatccgcttttctatcacaggggtgacaaatagaaacttttattttgatatgtccttatctaagtgatgtctgaggtctgtatatgctaattcaggattttttttctgagctaacctaggaaccgatagaacttgagatttttctgcagtgtaattttgtctttgagttggcagtgatgagcagctacacttccccatgaaactctatcatcgtatttagagtggttgctttctttggggttataatcactacttcccaacccttcctccacctaactggtggcttcacacaagaatgggagactcacctattaactgattagaagccagcaataacaaccagcaccaaaagctgtcgagctatctaaccaaatggttgtacagaaaataaacagctgaattcaggcaaacaactggaagcagccaccattgtttaaaaaaaaaaatcacctgcccagttcagttgtgtaactttgcacagcagggagtctcagtcctaagcaggtggcagagtgtcttccccatggtaccatggctgggaattagagcatcaggtgtcctttaccaagacaggcagcgtggtgatgggggctgagggatagatgggaggaggatagaaaggagaggaataagaggggaggaggaggaggacggatgagagagagggcgaggaaacaaagaaatgggtggtatacgcatccaaggttgtctacaatcccagatatttaggtgaaaaaggactgtccttggatctggggacagaggtgcagtcctgcttccagcactgataagcattatgatcttgggagaatcacctagctggcctgtgcttgatttttcttttgtaatctaagagcatggtagtcggtgggctctaagcttctcccaagcctgtgagtctctgtgaagctgaggctttgggagtccactccgtgaacccagattccacagggatgtgcctggcaaaatccaagtgggtttctggctgaagctgttctgtgggctgccatgtttgtgggacatctcatctgcagccgccgcagcgacctccttgtccgtccagccaaggggagggaccggaagccaagcggaggggccggtagcgccgtcgttgctgatgcttctgcttttggaattcggatcataaactgacagggttcttcctgtttcttaataaagctatttgttttactgtctaatgtgtttctaagcagaaatagacaaacaaaaggacaattgattctagaagagagatttagtatggagtatttgaagaaaagtattgccttagaaataaggatgttttgtagttaattttacattaaaagttctgccatattgattaggatttagaaataacatacgaagagttcttcctgagtagcagtataggaacaccagaactctataaacattttattcatcattcttcatctgatttttttccaaaatctttttgctccctttgatttctctctttttttctgctctttcaaatgcctagacagagccatattgattaggccagtatttacatatcacatgcccctgacgtgggtttaatgccccgtagtgtttgatgctgtggtctgggaaagaatggaacaggtagctgcccgctgagtcaacgaggcccatgcagttatcatcgatttttatttttctctttaatcatttagccaaggttgcctctttaaaatatctacttcctgggggatgtttccctgactcttatttcaaatctaatactttgtatttgagtctaaacacaattcagggaatatagctattaaaagcagaacttgattttgtttaactagtccagagcgcgtgatggctttggagcagagtggagaacaggcacagaggagcacgagccccaggaacaccacttggtgcccctccctcgtccttccaccgagctctctgcacgtatcttaccagggcgtgaatggagcattctgcagccagacacatccaacccacagcaaaccctccatgcaagcttgcctgtgtcctcagacattctaccctttatttctcctcttgttctttgcccctaagtttgtccatgcactcgactttctaacgggccatggtgtgtgtgtgtgtgtgtgtgtgtgtgtgtgtgtgcgcgcaagcactttgtggaggccctgaaggcagcatgtaaggtggtaacacggtagacattctgccccaggtttcagacattgttaggctgaagcttttattggaggtcaaggcagctaataaagtgggccgtgcaattacaagagcattcagcagagaaggatggctgaccctctcggcaggctgagagcagaggaagcggttggcagctcctagtcctcccatgatggctttacaagcattttttgcagccggggtggtaaatgcgatacaaaggcatggtttcaatatatccaatgaggcactctgcttcctgtgtgaggcatccacttgggggaaggaagttgcccggctgtgggctttttgtggtggtggtttctgctaatttaccttttttatagagggctcataattattagggatcctccataatgcccctttatggtggtcaggaaggagataacaaaatgatgcagaggtttaggaggcttctccagggtcacccagaaaacctctggattctgaatctccttcaaagatttaagaggatttatttatgctgctctcttgcccatgtggatctccttgacactacactccgtgagcgtagttaatgtcctgtcttgttcactttgttttttgtttggtgcctgtgtaccaagtagatttctggtgttttgaaaaaaaaaatcacccgtccactgctgcataaccaaaacgtcactggtgtgaaggaagaggatgatagaggatgggacggtggtgacaaatggcgggatgggagatgatgcctgggtgagtcctggaaagtgccgtgatgccatcccactgacatggcctcctgtattccagcaaagagtgaaattcacagggagcacagagtaagagcagcgccttcacctcggtggagcttagtctaggcatttatgggtcggctggtttgagggtccttgcatttcttgtcagtcaatacgtccttgttttggctaagtctcatgccctcatatccacttctacccttgcagaataaagacatgtgggaatgctcactggatgcttacaattggttccaggtgttccagggacgaaacttatcagaaccaaacatagagggcaaatgtcttagccaattcatgctgctataacaaaataccacgaactgggtggcttataaacaacagaaatactgatttctcacggttctggaggctgggaattctgagatcaaggccccatcagattgagtgtcttgtgaggtctgctttttgattcatagatggcactgtcttgctgtgtcctcacgtagtggaagggactggctagctctccagggtctgttttgtaagggcaggaatcccaattatgagagctctgccttcatgacccagtttgctcccaaaggcccacctcctactaccatcactttgggggttaggtttcaacatgattttggggagaacataagcgttcagtctgttgcagcaagcatgaggtcacttgtctagacactgacccctcaggcagtgttcatgtttggtttaatttttccctttatctggtaattgattctgcactgtctccattatttggtgagatggtaacatgtgattacatcccaatggagttgggcatgagaataagaaagaaatctccctttaaaggctttggactaccttggagtttgaagagagtggaggaatgcagtgagctggttttgatcttttggtgaaagtgacaaggaggcaggatggtttttccacggacattgacagggtcgtgctggttctcccaaagagaaatagagtagagttcatcacattagttaagagcacctcttcagcacattatatctcttcagcacatcgtttaagagcatcgtctttaataattcttacatggggcccgcacggtggctcacgcctgtaatcccagcactttgggaggccaaggcgggcggatcacgatgtcgggagttcgaaaccagcctgaccaacatggtgaaaccccgtctctactaaaaatacaaaaaagttagctgggtgtggtggcacatgcctgtaatcccagctactccggaagctaaggcagaagaattgcttgaacccgggaggtggaggttgcagtgagctgagatcgcgccattgcactccagcctaggcgacagagtgagactccatctcaaaaaaaaaattcttacatgggacaaaaatcactatcctatgtcaattgaaataaaggccattagtttttaacactgtataaattgccttttctcctgggaacttcagcatattcttttaaattattagcattttataatcatagaacgatggcatagagggaacctacagggtgtccagcattgcattacagttccctgatgaagagcatggttcttggggtctggccatcccatcaggatttgtatattttgctctgccgcataccagctctgggaacctagagaaggccttaaccattttccgtgttggtttcctcgcttgcacgatggtgttaatcataataactgcttcacaggcgtgttttgtctgctgcatggtagtcattcattaaatgtgagtatccaagctcccatcccaaactgccagaagggaaaagtaaaacttacacttttagacagcgacctcctgactccagggttcattccatctcattaacagtcagttcattcatttttcatttccttatccatccacctgtttgtttatccactcatctacctgtccagcatttctttggccttcaccgtacattcgtgtgtctagacttggtggtggggatgtaaagatgactaagacgcagcccttgccctcaagtccctcccagtctggtggggggggtgggtacagaagccacgtggtaagtgcagagttaggacacttggggagcagccagcatggctccgggctgctggaacattgcatctttcttttcttacaggccccgcctaagaagtgtcatggctgggagggagtcggaaggggtagcttcctagaaggggtgatgatggagaggagttagtgagagaagactgaggaaggtgaggaatctcatagctagagaccagaaacggccttgaggggctgcaggaacccaaagaaatgcagcattgacagacaggaggtgtccaaagtgggtggcccagctgggcatggtggctcacacctgtaatgccagcaatttaggaggccgaggcgggcagatcacctgaggtcaggagttcaagaccagcctggccaacatggtgaaaccccatctctactaaaaatacaaaaattagccagatgtggttgtatgcgcctgtaattccagctacttgggaggctgaggcaggagaattgcttgaacccaggaggcggaggttgcagggagccgatattgcatcactgcgctccagcctgggtgacagagcgagactccatctcaaaaaacaaaaacaaaaacaaaacaaagagggtggcccaccacatcaatttcacaagaagtgaaataacaatgtaagatttatatgtcagttttaacaagtgatgataccgtgtaatacatcagtatagcagtacgatagccatgttcatagcagccttattcacaatagctaaaatgtagaagctacccaagtgtctgctgacacatgaatgactaagcaaaatgtggtatatccatgcaatggaatagtatccagccctaaaaaaaggagattcaggcacaggctatgacctggatgaaccctgaggacattatgccaagtgaaataagccagtcacaaagacaaatattatatgattctggtgatatgagatacttagtgtagtgagattcatagacatagaaagtaggatggtggttaccaagaattggggaagatgaaaagaattctgcatatggaaggtggtggtggttgcacaatggtgggggcgtacataatgtcactgagctgcacgctgaaaaattattatgagaggtcaatgttatgttgttttactgggcgcacacacacggaaagtagtataagttgtgtcacaaaattgtatttgacggaagtgatatccctgtgcactggtcgcccagtgacggctcatgagggtaatcatggtaatacgtacaatctggccaccagagactcccaagcacgttacaagcagtctcacgtttgatccaccctatgagacaggccactttacgggtaaagaagctcagtgaggttagatgcctggagacgcgggccggggaggctgtggtcctgcactcactgcacagcccttcctgctccccggcctccctgtgaggctcactgcagtcccttggagggaaaggggatgctattgagaattggggccaggtgaatggctatagagggatgcaggagtcccccccacctttttctctcctttctcttacttccacggaccttctgagaatagggctggccctggcagccaagagccccttagctcctccctctgcatttgccgtggtacgacgtgtgacacgggccagacccacgctgctctgttctgcaggactcagtgcaagacagctcttttatttgtgcctgtggtcgttagaaaagttttacacgggcagggcagtcgtcatcactaagtaaacacattgagccggcaaatcagtctttgtgagagcagcacattaaatggttccctgcatagtagttactgatacattactataattacatcgcacattttgcagtaaactccaaaaaaatgatttattatctcttgggtgcttgacagcaatatgctcaatggcagcataacttttccaaatctgcccacacattttatgtgtatgactcttttggaattagaccaaatggacccttttaaagatctgctgagttaacaccaccttatatttatatggctgcgttcttcaggccacactgtactgggtcattgccactattttcccacctttctctttacacccctttaaggagtatcatggccagatgtggcgtggtgtctcttaaattcacttaatagacaaaagagaaggacatctctaacagtaatacaagaaaaaaaaagagagagaaggacagagagaccaagaaactctttttttactcctattcagcaactatgtatgtacttatttatttatttatttatttactgagacagaaccttgctctgtcatccgggctggagtgcagtggtgcaatcatagctcgctgtaacctcaaactcctgggctcaaacgatcctctcgccacagcctcccaagtagctgggactgcaggcatgtgccaccacacctggcccctcagcaactatttttacagtatcgactctgtgtcaggcgctgttctaggctctggacgcttgatgagtgtcaccagtgagcttaggacagagctgacgtcttctgcctattctttggctttactccccatagggcttttctggagaagggccctttggagcttgtgggatttcagggtttattgaaatttatttacctttttgcaggtgtctcatgcttcctcggttaaggaatgggaattatcataatgtataccatggtgtctggccacagatgaagtaccacagtcatcagattatgaagcctccaagcttctcttgcagaggactccttcaaaccactctcgtggactgtggctaactgggagtttctcctgggggcccattgctcattccttgctgtctctcccggttgagacttcccaccagggtgaaaagctagaacagtggcttttgtctttagcaaggccattagatggtacagtaactgctttcagatgctgctgatgtggcccagattcagcatagtgacccagaggtgaaaggctacatattccattacaacccctagccaatctgcctccagactctagtgcatttcagtagagaaaggaaggaggatagggtgacatacacactagatagcagctagaagtaagtctgggaaaatctaagaatggagcttcaatttctagagatgcttttgtaaagtgcattacttatgtgctgtgaacgtgatcatgatggattattcaggtaaggtggagacgagaacacagagaatcagaacagggaacttggaagaggcaaagtaaacaggcatggttgcctgtttattttgaggtttcgggtggctattagccctacaaatgccagctaagggcaaatttctgttggttgagattctttgagattctgtcaatgcaagattttttaaaaagcaagtataaaagatgagaagatgcagttttgtggcaaagcgtagaaagtcactaagtccacacatgattaaaaatagtgaagagaccataattcaagtcatatgatctcttttattgtaatcatatttactcaaaagcctcttcgtttgttccatttctaattgttttctcttcttgtgtagagttaaaagagtcacgggctttattgaagggtggagaaattttattttcagaaattttgcctcaatgtttattccctgtgagacactgacattttcttctcaaaacatatatatctatatctatatctatatatttagatgtctatatatatagatatctatatctatatatatagacatctatatatatagatatagatatatagatatagatatagatattttttttgagacagagtctcactcttgttgcccaggctggggaacgagctcagctcactgcaacctctgcctcccgggttcaagcgattctcctgcctcagcctcccgagtagctgggattacatgcatgagtcaccacgcccagctaattttgtatttttagtagagacggggtttctccatgttggtcaggctggtcttgaacttctgatctcaggtgatccgcctgcctcagcctcccaaagtgctgggattacaggcgtgagccttgtaattacaggtgccttgaaggcgcctggccttcaaaacatatttgtttagggaaaagtagtgtcagatctatgaaggtcatactggaagttgctaataagtagaatgccatatttcatggaaggagaccagagttcaggaagcatccttcccacagggtctatcatgggatttagttccttctttttctgcatcccagatgttcctggaggtgcatacttgctggtaagcctggagttggagggatgaaagctaccaaaggccctgatgggtgttatataagatgccacgtgtgagccactccccacaagacgccaacaagcagggaacctagttcagcactttcatacccagtctaaaggcttctaggaaactgtgggtcagctggcccactcctattaaccatgccttcatctgtagtggaaggaacatggctcacaggatgggctagcaggcgatggggcctttgactttcagattagtcttcctgcgacttttaacggtcatgtttacttttgaatataacctgggatgaagcatttatcagcctctggtacttttgtgaattggtagtttacagcgggcttactggtagccttggccagctctttgccataaaatctttaagcatagacacacaggggtatggccattccctttatttttaattaattaagtagtttctagagggagggtttcgttctgtcgcctcgactggagtgcagcagcatgatcctagctcactgcagcctcaactctctggctcaagcgatctgcttgcctcagcctcctgagtagctgggactacaggtgtgtgccatcatgcctagctattttttaaattgcttgtaaagatggggtcttattgtgttgcccaggctggcctcagatgcctggcctcacgcctcctgccttggcctctcaaagtgctgggattataggtatgagtcactacatctggcccatgagtcactgcacctgtcccattccccctgcctttattgattcctacttccgcctaggataacactatctcttaaaagagtgttgccaagaaaccccatttttttacattctatattgtattttaaagaggaaaccctatttagagatatttttgtgggaatggttttggagtttcaaacttctgaagaacctggactatgttgggggcatttacggtggcagtgcacacggctcacactgacgaatggctcggctgagcaagccagtgaagcagagggcaggagaggtgacttcctggcatcctggatctctgcaaatgaagttgctgtagcgccattatttacctcactgtatgtgaaatgaaggggtaggattcattgccttttggttttgattttacttgtccttaggggtgtgtgtgtgtgtgtgtgtgtgtgtgtgtctttccccctggccttctggtgacggataatggtgatggcagtttaggcctgtttctgattagtaaaatgacccttcaaatgagactaggagaaaaatgctctcctgaacctctggaaccctggtttttcctatcacaagtttaatggcttcaggtcctatgtttttagccgagaaaatgaaagactcagtcagcggggattagggttttttgtttagagagaaggtaaaaaggttacatgaagatttggtgtgggtttagactggggttagcctccacgtaggaaaggtctgaagatcgagaatgaggccaggttgtgcaggtgagcagagctatctttggcagctagattgggatgtttctgggcagagatatttgtcccttaggagtgtatcaaatcacagaggtcacatctgactgtcactgctttgttacaggagaaagacctgttcatcagaataattcctacgctttgagccacttattcaagtgatgctagtcacgttcagaaaacagataacctaccatgtgtttgtgctgtgctaggagttctagagctttcaagcacaaccgtatatccgaggttgactttggagctgtcatcgtgggtttggggctgtattttaaaataagaggagcggtgtcttttgggctttgcttttttttcaaatgcttttttctgagtcccttcagtgatccattcttgagctgtctcttcagtcgtcagtctcttggtagtctttattctaagtttttttcctttttaattgtagtaaaatatgtatagcataaaatttcccatgttattcctttttaagcgtatggttcagtggctttaagtaccttcatatcattgcacggccatcgccaccatccacccacttccatcatctcaaaccaaaactccaaatgcattaagcaataacttttgttattaaagtgtttaataatcactttggtgctgtttaacctctttaccctgatttcctccccctttcttgctccttttctagtagtttctactaatagatcacctgagtaagactgcccgtgtcaagcctggtgtcaccttaggttttggggataaaggctggtggtaccgcctgtgacgtgggcttgccacatgcagtgtctgagtggagggcaagtggggccggctctacagccatccgagcagacgggggctctgtcccttactcctcaggcacctgacgttggacttgcctctgggtaaataattcttatcaagcatttacttggaacaattcttaaccatgttttttttttttaaataattactgacatttgtactttaagctgtatacaaatgttcatatttgacagatattctaagcattagagatatttaatgaaaacttgtaaataggcaaaacgacatttaaaaagactgcccctgtctttgtgaaagcagcaaatagttctcttggctcccatttccccctctccactctaaaatatttttaaataaaatagcgtttgaaattctccagagaatgctttaaagagaaagatccacgtgacctcattaagtcattcattcacgtattcatttatcacacatttatcaggctcccaatatgtgccactttctctgtgttaaatactatggattcaaaaacaaaggaggccgggcgcagtggctcatgcctgtaatcctagttctttgggaggctgaggcgcgtggatcacctgaggtcaggagtttgagaccatcctggccaacatggcgaaaccctgtctctattaaaaatacaaaaattagccgggcgtggtggtgcgcgcctgtagtcccagctactcgggaggctgaggcaggagaatcacttgaaccccaggaggtggaggttgcagtgagccgagatcacgccactgcactccagcctgggcgacagagcgagactccgactcaaaaacaaaacaaaaacaaaggagaccccaacattggtcgtgagaagtttaccaaccaggaggggagataagtgtgtaaacaagcaaacaactgtcgtaaaggctgtggcacaagagtgggtgggtagaattcgggtaatccaggaggtgtcagaaagaccaggggtggacctttcatctgagccacgaggacaagcaggtgtttgctttggagacagagggtggacaggatgttctggagagctgcagttgcggggcagaggcagtgaggcatgaagcacctggcgcatggcctgtgcgggcctgggtggtgagggcaaagacagtgagcagaggaggcagcgcctggggggcctggccagggaccccaccccctgcatcctgatgaagaactgtaagaggaccatgtctgtgtgcctggataatcgctggcagcagcaagggaatttcgaagcaagatctcagctggagacaggcaagaggctgtcgccatgcttttaaagaagtatcagagatattttgcttttgaaacatttggcttcactggaactttcgtcttcctatgaaatattggaggatgtcagatcctcccccatttctaagagtaggagagactcatgtatctttctctttggggtaaacattcagcttcagatcctgcaggtagcagagagagagagagagagagagaggagtggttaagagtgtggccattggagtccagggagtctgcgttctaattctggctctcctcttaaatagtcctgcagcttgggcaacttactcaactgtgtccttcctcaacttccacatctgtaaaatggggagaacaccttcctttcagggttataggcaaatgaggtaataatctcttttaaaatacttagcccaagtaaatgctcagtaggtgctagctatcatctccagtttctatttcctgaactgtgaccttgactaaatgtggcccagtcctttaagagaggggatttgtggtcactttaaaaaaatcttcagctgtgctcatgtggtccggagtactgtgttagttttcctgcctgtggctcatgggccagtggtcaccatggaaatggtggtggtgggggtaggggtgggggaagagaaggaagccgagctacagagacattcatacacttgttcgtgaccacagcaggatttggggtccttctagagtcactgctgcaggattctttttgtttttttcttttttagaggtggggccttgctctgtcaccctggctagagtgctgtgaaacgatcacagtccactgtaaccttgaacaccaactgcaggattcctattctcttttgtgggcaagatagggtgggggacattgtgcacccccttcttctctgtcccagtctgtgacagaccctgtcagacattgagaggcctgagagctgcaacagtggttgtgccagagaggaatttgccaaagctctcagcgacctttctgcattaaagtttcgtgccattatctctttcacatacaaattcaagcccttttttttcccttgaaatcacttttgtgctgtttaacctctttaccccgatttcccccccttctttcttgctccctttctagtagtttccagctaatggatcacctggataagattgcccctgtctttgtgagagcagcaattagctctcaccctgagaaggcggcgtgttctgttgcttggcagccttggtgtagaggatggattgggtctgcgtcttttcatttgaaagtaggttatcgattagcacggatgccaatttactacagaggctgttgccaatgcctcttgatctcattatggtgtaaattttcaagattgtatcacattagctcaggagaattcaggagagaaaaacgtagtaaagttaaaaaaaaaaaagccaaaaaaaaaaattcttccattatattatagcccaggcaaaaataaacatggctacagctggccatgttcggaaaggacctgcggtgtgtgtgtggctgggttggttatgagctgtaggaaaacctagcgacaggtttcaaagtacttcatgtttttggtttattccttcgatttcttttaggactgattttcttgggaaatggtgatttttagggaaactgcagactgttgggtctatttttttatgacaagagccctctagtctcagctttgtgagacagaaaaaggaggcagggacagtgagatggcagaggaggagatgctggcgaccgtgctaatgctagctaatgctaattttgaggaccagatagtttgggtgcaggcctaactgttgttcagttaggaatctgagatcattcccttccaaaaagtggctttattgagatacaatttatgtgccataaaattcacctgttttaaacgtgtgcgggcctaactcttggccaattaggaatctgagatcattcttctataaaaaatggctttattgagacaatttatgtgccatgaaattcacttgttttaaatgtccagctcggtgcatttccatttattgccaggtctgcagccatcatcactatctaattttagaacatttctgtcactccacaaggaaatggcccattatcagtcagtcttcaccctactccactcccaggcacaggaaaagactaatctgctttccgtctctgtagattttccttttgtagcattttacatgaacaaagtcatacaatctgaggccttttgcagatggcttctttgagttggtacagtgttttcaaggctcaccctgttgtagcatgtatcagtacttcatttctctttattgcctggtaatattccactgtataaacataccacatgctgtatatccattcaccagtcgatggctatgtgggctatttctagtttttggctattatgaataatgctgttatgaacatttgtgtgtcaatttgtgtggacatatggtttcatttcttatggatagatgcctaggtgtggaattggtagttgatatggcaattctatgtttaacattttgagaaacttttttttttgaaatagagtctcactctgtcgcccaggctggagtgcagtggcgccatctcggctcactgcaacctccacctcctgggttcaagtgattctcctgccccagcctcccgagtagctgggattacaggcacgtgccaccatgcctggctaattttttgtatttttagtagagacagggtttcaccgtgttagccaggatggtcttgaacctctgaccctcgtgatccacccgcctcggcctcccaaagtactgggattataggcgtgagccaccacgcccggccccattgagaaacttccaaactcttttcccaaatggcagcaccattttatattcctcccagcaacagatgaggctttcgatgctagtatcaccctgtagctttgatttgcatttcactaatgaccgatgaggtatagcatcttttcgtgcttattgaccattcatatattttctttggaaaaaacatttattcaaccttttggtgttttttaattgggctatttttgttgttgttattgagttgtaagtctttaatatatcctggggtataagtctcttatcagatatatgattggccagtattttctcctggtctgtgagttatcttttcactttcttgatggtgttgtttgaagcacaatagttttctgtttgatgagatccagttgatcaatttttcttttattgcttttggtatctaagaagttgtctaatccaagatcatgaagatttacttccagatttttgtcttaagagtttatagttctggttccaacacttaggtctatggtccatttcgagttaagatcactcatttttcttgcataaagaaattttccagactcattcaggtttcaagaaaatagacttagaatgaccactgtggattttcttttctgtccttcattttctaacaaagcatatgtagtggccgtcacatgctgggtagaatcaagattgcaaagactgacgtaagaatttggcacatgagcaagctggagttggagatcctgacagaatctctaacacatcttctgagggtgggagaactgtcacagaagcaacctgcaggtgtgagatggactccagggccttggcactcatcagaagaaagcttgacctcctcacctgcatggggttggggaacaaagcaaattaagcatcagagaaagacctggcggtatgacacgattaagccataatggcaccagggcacagctgccaagcaggttgtcagaagggcagacagagtgatggagttttttgttggggtactgtcatatagttatttgatgaagccatctctctgtttttgactacattcttgctttcattggattttttcctacatcttgacccctaacctcctgcaacaggtatgggtgggagttgttgtttttttttttttttttttgagctttcttaagtatacctgtggttttcctccaagtcccccaaggatcagttatagctctgggaaagtggggggaagtgagatgctagacttatttttaccaaaatccaagactagtgacacaaggtagaagtcactggatggaatgaacttgtaggatattcccttttggggcactaatcacaaaggcaaattgaatggtagagtgtcaaggtgaactttaatactttgtaacatgagctccaggccaggtcttaaaacatcttggacatattgcaagaaatagctcagccctatagcacattgaatgagaatggagagtggatcctgggttggctttagactctggccttggcgtttgtgtgtacacatgtgcgtcgtcatctgtgcacacaggtacacaaatgtgtctttataatctctggggaagcaggttcacttttaatgttctttcatctgctatttgattttaaaatcttgggggaaagtattgaaaatcaaatgtactcatctgtcctgtgtaaaaataggagtcaaaattttaaaatctgaatttatgcaacaaattaaatatggagtgttacttctcatcacaaaataatctagccattgttaccttcaagagagcagtttctcattgatgcaattaaaatgaacttctcagggattcttttactataaacggaggtgcacccaaaccttatatctctgagaaaacagtggctgtgtaatgagtggtgaattgtttttggcgagtgtggctgccaggttgcttcctcctaaatctgagatggtagacagaggtttattattgctgtagcagatagagagcgtcttgcttgcactgcagaagtctgcccagagcacttaattagacatttctgtggctatttgcagcccagtacaatgggagatcaggggattccagattggaatcctagacatccaaatccatagttagcgttcagagccaaattttttattgcttctctgggattatgctaatcattcaattcaaatttattcaactcacatttttgacattctgctgtgtgctaaggtggtggaaatactttttttttttttttagacagagtcttgctctgtcgcctaggctggagtgcagtggtgcaatcttggttcactgcagcctctgccccccgggttccagcgattctcctgcctcagcctcccgggtagctgggattacaggcacccgccaccacacctggctagtttttgtatttttagtagagatggggtttcgccatgttggccaggctggtctcgaactcctgacctcaggtaatcaggtggcggagatacttaatgaaacctggttccaaccttcaagaatagcacaaggaagggaggggggtctggataaaatcgaaaggtacaagttgtgttgggactaagtggatctaaacatgctttctgaggctgtcattaccccaaaagtcagctttgtgtcaatcaacaaacactgtggtctgtcttttctctcagcaaagtctgaaggagtgggacactccaactgtgtgtcacaggaatgagctgtcatctggcaatttacagaccagcttcaaggattccatttaccaccagtttattcacttgtatttctaatatttatattttcttaagatgatcccctctcccatgtgtgctaattttctaaataacagccacatcgacaaaatgccccctttgatgagtcatgggctgagctgggttctagtgatgctggctacaaccttgagagttaaagaaaagctatttatattttctttttattattttattttattttattttattttgagacagagtctcactctgtcgcccaagctggagtgcggtggcgtgatctcagctcactgcaacctccgcctcccggattcaagcaattctcctgcctcagcctcctgagtagctgggattacaggtgcccgccaccacgtccagctaatttttgtatttttagtagagacggggtttcaccatgttggtcaggctggtctcgaaccccttacctcgtgatccacccaccttggtctcccaaagtgctgggattacaggcgtgggccactgcgcctggccctatattttcttaagatggtcccttctcccacgtgcgctaattttccaaataacagccacatcaacagaatgcccccttcgatgagtcatgggccgagctgggttctagtgatgccggctacagcctcgacagttaaggaaaagccactttcgcaaagaatggaccctgcttccgtaaccttgggttaaatgttgtctgcgagcaccttactgagtttcttcattttttgctttatttgggtgcagctaaaccagctaaacagccttaataagttactccctgggatacaataagctccctgcatctgtgaggtgaaaggcagcccagtgaattctgtcgacagtagctgttctgagaaagtgagcttgaaagggggtgtaggagtcaaaggtgagaggtcatgacgtcagtagtccaaacacctggaggttttagtctaacttcctttcttgttacttagccaggcagtaagttacgtatctctaacttggccttctgtaaagtgggactcttagtacttgccctgcttatctttcagacagaatcaaatgaaatagcagaagtgttttgtcaattaaagtgacatcagatgcaaagagtattattatatcatcatcatcatcatcaccaaaggaactatggtaatgttggataaaaagccaaatacttttttttttctttctttctttctttttttttctgagacagagtctctctctgtagcccaggctggagtgcaatggcgcgatcttggctcactgcaacttccacctcctggattcaagtgattctcctgcctcagcttccagagtagctgggactacaggcgcgcaccaccacgctcagctaatttttgtatttttagtagagacagggtttcaccatgttggccaggatggtctcgatctcttgacctcatgatctgtccgccttggactcccaaagtgccgggattacaggtgtgagccactgcactcagccaagccaggtacttttctaagtaatttaattctctagaagaaaagatgataagatctttgcctggaactggaggccattatcttaagtggaacaagtcagacacaaaaagacaaatactgcgtgttctcacttataagtgggagctaaataatgtgtacacatggacaatagagaaagacagacagtggagattgcaaagatggggcaggttgatgaggaatgagaaattactgaatggacaccatgtagtttattccagtgatggatgcattcaaagctcagacttcaccaatatggaatatgtccatgtaacaaaattacacttggaccccatacatttatacaaaaaaagacctttgacactaggcataactagtggtttggttaatgcagaggagtattgctgtggtcgctttcttttaaccagcttgagagacagtacaagagaaggttcaggttcttgtcttgacagaagtctcagtacacccacctgtactttaggagaatgtggattggaaggctcttggtgtttcagttttctgagtgggtttgagtaattatgttggagagggggaggttgatgagagtgtaacacacttttcgtggctataagagatgataataaagagttattagaacatttattagacacatgatagggaaagttggttaagggccttgaagaacaggcaaaggatgtggaattcatgtttttgagctctagatgatatgatgaaaattgtggttgaggattatttttctgatcttgaggaaattcaagtttgaatgatgaggatgaatgaggttaatcaacactgaaattggaatcagaggcaaattcaaggccgggcgcggtggctcatgcctgtaatcccagcactttgggaggccgaggtgggcgaatcacctgaggtcaggaattcgagacctgcttagccgacatggcaaaaccccatctctactaaaaatacaaaaattagccaggtgtggtggcacacgcttgtaatcccagctacttgggaggctaaggcaggagaatcacttgatcccaggaggtggaggttgcagtgagcctggatcgcaccattgcactccagtctgggcaagaagagtgaaactccatctccaaaaaaaaaaaaaaaaaaaaagaggcaaattcaagacacagtagaacaggggtgtggtcggtgaagccgggagagtaggcaggaagtgaggccagtttgggaaccagcaaagcccacctctctctcgaatagcccctatttgtcccaagatcttactttcctaccatcatgtttggttttgactgaatagctcaattcagagagacatttcaactttccctctgtgctttgcaaactgatgacgaagatatgttttaaggaactagctcccaagttagttcctcttacaaagatgtacagattttaaaactgaacatgtgtgtgttgctgctgagaatgtaaaatcatgcagctgctttggaaaatgatacgacagtttttcaaaaaattaaacaaggaattacatatgattcagcagttccacttctggtataaacccagttgaattgaaagcagggactcaaacaaatatctgtacacccatgttcgtagcaacattattcacagtagccaaaaggtgggaacagcccagtgtccatcatggatggatgagcaaaatgtggtctatgtatttacaatggaatattgttcagaaaaggagtgaaattctgaaacaggctacaacatggatgaaccttggagacatgatgccaagtgaaataagccagtcacaaaggacaaatgttgtatggctttgcttacacgaggtacataaagtaatcagactcagacaggaagtagaatggtggttgtcaggggctggagttgaggggaatggagagttattgtttaacatacagagtttcaattcgggaagatgaaaaagttctggagatgatggtggtgatggttgcgtagcaatgtgaacgtactgaatgccactgcacacttgaaagtggctaatatagtcaagtttacatgtattttaccataataaaaatggtgaactgtcattatcttgcattgttgatgcttttgttcaaatcctgggaaatatgatataataaatctcttcttatgttattccaggtctggaaagtgaactctggttaacttttcaatatcattttccccaggaaaacaaaagataatgatgtttcctaggccaaacacaccttgttaacatttccataacaaaacagcaaactgtcatttaaagtttatctcactgttattcttgagccacaaagaagcaatgtttacagacgattttacactaacaattggatgtgctggaaatgggtatttgggtgatctcagggttcgtgaacctcaggctgtggagtgttcttgttctagatgtccgctgagagttttctttctcaaggggctcctaaattagaggtaagccccctaccacctgtgtgatcccccagaagttagaaccttgcgccttctctgtggcagggaggagacctgtcctctctagagctggaaggttgtgtgttaacaaagttgaaggcagtcatattagtctgttttcactttgctgataaagacacacatgagactgggtaatttataaagacaaagaggtttaatggactcacagttccatgtggctggggaggcctcacaatcatggtggaaggtgaaagtcacgtcttacatggtggcagacaagagagaaagagagtgaagtgaaagaggagaactcctatgagaccatcagatctcgtgagacttactcactaccgtgagaacagtatggggggaaaccacccccgtgattcaattatctcctccccggtccctcccacaacacgtgggaattatgggagctacaattcaagatgaaattaacctatgaaaccatcagatctcgtgagacttactaccatgagaacagtatggggaaactgcccccatgattcagtcatctccccctgggtccctcccacagcatgtgggaattaagggagctacaattcacgatgaaatttgggaggggacacagccagaccatatcagcagcctatgggatgttcccccgagggctccacagccgggtgctcagattgctgggactctcttgtcaggacttcttccttcttttttgcctaggtcttatcagaactaagccatttggtttgtaatctttcctgtaacactggctgcagggtctttagcctggattctagattggagggtacagggcagcagcctcacaggtgcccattagcacatcccacaagcagtcacggcactgcacttgcactggaaacagcttctcattttcccgggagtaccttctgccaactttgagaacaccaattcctaattcctgttccagtatccactttggttttatacataggacatcttttcctataagttttccctgaatgttttgttttgtttttttttttttttacatttcttacagatgtctattaaaatctcagcattcttataaaatactctttgatttgaagaaagtagtcattttcccttaggcttatgatgcctcagtctccctataagagataagaaccaggctgggcgtggtggctcatgcctataatcccagcactttgggaagccaaggtgggtggatcacctgaggtcaggagttcgagaccagcctgaccaagatggtgaaacaccatctctactaaaaatacaaaaattagccggtgtggtggcaggtgcctgtagtcccagctactcgggaggctgaggctggagaatcgcttgaacctgggaggcggaggttgcaatgagccaagatcgtgccactgcactctagcctgggtgacaagagcaagactctgtctcaaaaaaaaaaaaaaaaaaaaaaaaaaaagagataagaaccagatatgcataaatatgaatatttgttcatttgtaatctggctcttcctgtgataagatgccaccaatatttgggtagaatgctggggagaagttacctcccaacattgaaaagagtaaaatcccagcactttgggaggccgaggcgggcggattacctgaggtcaggagttcgagaccagcctggccaacatggtgaaaccccatctctactaaaaatccaaaacttagctgggcgtgatggcagacgcctgtaatcccagctactcgggaggctgaggcaggagaatcatttaaacccaggagacagagggtgcagtgagccgagatcacaccactacacacccacctgggcaataagagtgaaactcttgtctcaaaacaagcaaacaaaaaggattaaatatatataaaaaaatctagaaggaaatatatggataaagaagtttctaagcttgatagaatagaaggtatcacaagagaaaatatagacaggtttgactacataaaaattaaactctgtatatcagaaaacatttgtacgttgacaaaatcaaagggcaggcgacaatctgcagagaatgtaaaaaattacaacgaagcatgaatatctttaatatagaatttttaatacaaattgctaatgtcaacattaagaccgcagtagtttaagggacaaaggcagttgaactgactttgcaaaaggggaaacaaacacacatggctaccaaacgcaagaaaaattgttcaacttcattagtaatcaaataaatgcaaatcgaaacaacagtaagctaccatttttgatgcagcttaacaaagattttgtaaaatgtgatattctttcatataatgaaggataaattaataccattttggaaagcagtgtgatgaaccttaaaattattcttactccttgacctggtagttctatttctgggaatctatcttaaggggataatcctaactaccaggattaatgcacaaaagtatttcctgaagcatttaaaaaaaataattataaagaattagaaagaagctgcatgttcagcattagggaaatggttacagaaattatgatcaatctatttgatcaaatgctgtgtggtctcttaaaataacatttgtaaaatgtttcccatgtttcaggggacgtgctcatgatataattaatgctaagtgataaaaaagcaggatataacctcaaatgtaagtattttctggtctagacagtttaaaacttcacaggaaagaaaaaaaaggatgcttgctacaatattagcagagaataatattgatggctgctggtctcccctagtaaactgtgtttcctaaaagggcatacattactttaaaaacatttttaattttgagatattttgtaaaaatttgattctcatatatctgtcttaagaatttattatataaatcatccttgaataaactaagttacatagttttcaaactctgtctcctgctaaatgatcatctatactgatgactttttaaaataatataaacttccaggagggaggaaagaggtatgtttattttaggggcctccagagcccacagtaactcttccttcttggggagaggagtctaaagataacaggcctgagtttgtgaactctcatctctagtatacttgacttcttctatgtatttattgattgtgtggtatcacagatttggggggtgcgtgtgcaggtgcacgtgtcccgttctgtagtggtggggattgggtttctagtgtacccatcacctcaatagtgaacattacacccaacagataatttttttttacttttagtctcagggcactgtgcaggtttgtgatacaggtaagttgtgtgtcatgggatttgctgtacagatgatttcatcacctaggtagtaagcatagtacccaataggtagtttttgagactcacccttctcttaccctccaccctcaaagtaggtcttggtgtctgttgttcccctcctagtatccatgtgtgctcattgtttagctcccacttataattgagaacacacggtatttggttttctgttcctgtgttagtttgcttaggatgatggcctccagccccatccatgttgctgcaaaagacatgatcttggctgcatagtgttccatggtgtatatgagccacattttctttatccagtctactgttgattggcatctagcttgattccatgtttgcactattgtgaatagtgctgcagtgaacatacgtgtgcatatgcctttatggtagaatgatttatgttcctttggtacttgacttcttattgccattgtgttcaccaaagacaatcatatgactcagtctgtttcaattggtttgaaagcttaggctttcctttttaaataaaccggaaagcttaggctttcctttttaaataaccttttttcaaaatttcatatttttttctcattttaggaatgtaataatagtcatcatgcgttaagagctttcaaagaaccagatcctgttctaaacactttatatgtgttacatcatttaatgttcacagcaatcctctgagatgtaggtactgttatcatcccagttttacagatgagaaaactgaagcacagagaagtcaagtaagtggagaagcccatgttcaaacctgagtcatctgtcgccagagcgtccctccactgcgccagatttatgacaacttacttgttctttatgaaggcagcaactcaggcacagtaggccaaggctgccatctgatgaaacaactggcaaatcaatggcagagaaagattcagagcagagacagggctgcgtccattgatcgtgttaggacctggaccatggggcgctagaaaatgacatggacgccagaaagtttctttttgctgctgactgatcatttatgaactttccatggacttttgaaaataatatcaaaataataccactagaattgttaaagcattccacgtaggacactgggtcatttgatttctgtaggaaaatgtgattttgtaggaaggcgtatggtagtttcttccatataaggccattatctcgtctttgaacctaatttctactgcagttcaggtttggagaggcctaattcatcgtggtggcacagttttaaaatttgcccctcatttggaattgatttagagtttccgtttacatagagtgcttgatgcaggaggcagttatggaaagggaggccctctctgagcacggtgcatggggttagagttgcctagattttggtaacatagtgacactgcaaacaaaactctatggaaacaaaataattttttttttctttttggacacagagtcttcctcatgcagcggtgcaaactcggctcactgcaaccccttgggttcaagcgattgtcctgcctcaggcccccaagtagctgggactacaggcatgtgccaccatgcctggctagttttttgtatttttagtagagatggggttttgccatgttgcccaggctggtctcgaacatctgacctcaggccatccacccaccttggcctcccaaagtgctgggattacaggtgcgagccactgcacctggcctggtttttactttcaaatctgatattttagcctgttagtgttaaccatgtttaactgactcaaatgaaatgctggccctggctcccatatagccagaagaataagaatgctggtaatcaggtattggcgtttcttcaaaaagccaaaatctgttgtaatagaaatactggtaatttcttcactctgtgaagtacatgtgtatgggggtgtgtgtgtgtaggagagggttgaagattttaacagttgtttgcccaaggttactatataatctaaacatatataaggctccaaggcatttagcttatggggaaaattaaatagtggctattttataaaggcaactagttgggaggcctcaatcattgttactttttatgggctctactaggattttatgtaggaaccagtgtgatctggggaggagggattcctttacacacatccttcagaaagccaccattgtattcctgttgcatttgatgaatatccctagtaggtttcttttctccacctgccacctaggtagatcaccactgctgcatgtcacttttactgaagtgagtaaaatctctgctagtagtgttttccaattatgcatatattttcttagtgcttatttggcactgactttggggagtcgtagtctttctgagatgggaataacatcatttgtttgttgcgcctcagttccaccgtcatttaaataggaggcgtgtcgtgatggtgggcaaccttgttcccacctgaccttgtgagatgcgctaggtggattatggtctttgaactacacattgcttgaattccttgggagacgtgggtcacataaacaggagcctgtgatttttcaggattgacggggaggggcatcttcctttcctaaatccttcctttgatctcctcagcggaggtcacttaagcaacagctggctcttctttgcccctggggctccgcttcagggccgggggaaggaggctgagcatgtcgagtgccctgggaaggcccatctgcctgtcaggtgttgtttttccgccaaacaccgaaagagctatgttttgttcctcttaaagagtttaccatccagaagggaaaaataagatagaaagtaaatagctacagcacacagtacctctgaggataggggtaataggattgtggtcaaagcagggtgtgctcggaaccatttgaggcgaccggcaatcatttccttaaaagagtagccttgagaaaagctctaatagatgggtaagattttgatgggattttggtaggagccaaggagagtaatcaaagtggaaaaaggagggactggagcccttgcctggggcttgaggttatcctcgaggtccttcaggatgtccttctgtggcaggaggatgatagaactatttgtttctagtgttttgtatggttttagagccttatatattatggtgacagatccaaggacacaatgatttgatggtgtccctgtaggaagaccccgtttaacaagaccactattttcctggtaaatgagatataagatgtatagtcttttgtttcctcccagcagctactctgtggatacatcctgtgaacttccctttgcaatgattaggatgacagcccctgtctctaagcttctacctgggctccctaagtccattttcttcccattcctaatagctctgaaaacaaccttccactgtgtttcctccagcatatttccgagttgattgtcaagcacagctcttatgatatcactgatctgctcaaagcccttccctggctctcctgttgaatggtgacctgggtgtaaatgcctcagacctctcggtctcctcccacctttccaagccatatccccttcattgactgtgctccaggcaccacctccagagtagacctggggtgggcctcagaactcgcatttctaacgggtttccaggtgatttccgagaaccactgccatagccaagccagacaggtgtggcttaacggacctcagaattctcccttggatatttttttaagtgcatcttccttcactttgattactctccttggctcctaccaaaatcccatcaaaatcttacccatctattagagcttttctcaaggctactcttttaaggaaatgattgccggtcacctcaaatggttccgagcataccctgctttgaccacggtcctattacccctatcctcagaggtactgtgtgctgtagctatttattttctatcttatttttcccttctggatggtaaactctttaagaggaacaaaatatagctccttcggtgtttggcggaagaacaattttgagataagaaatcctactcctcattgattctgttccgcatttggagatgttggcaagtgcgtcgagccactcagagggcacggattagattttattcatattagaatcctctgcatcacccgaccaattatttgcccacagtaagcccatcataaatatttggtgattgaataacaaccttccacactcaagatgttgcaagcctgagaagtaagaagaaagcgctgcatagtcttcctgcttctattcttgtaatcctcttataaaccatgggccttctaagagaacaattattatttttaatgaactggtgtgtggcatagcttaaacctctttattatccttcagcacttagctttgaataggattaatcagccaggaagatctgaggaggggcagggcaggcttcgttcccaggttattgcttttccagtgaaaagcactttgaagaggacagtggagactgatcttttattttaattcaatataattataactttgttttttttacacacatcacacacacacgtgctcacacacttcagaagtctcatggctaacgatggggctgtgtaagttattcattaggaagatttgagaagcagggtcaagcaatggagaaaaggtatatatttttgaggatttatttttagtatttgatataaaaatgtatgagtaatacatgctgattataaagaatgaaaataggacagaagaagatagagtcaaaagttaaagtgcccccggggaagtgtatttatataaagtgacacaggagatattttgaaattttaatgcccaaaagtaaagtaaatgatgttcaccatatagacgacaactaggcacagtttcaccacccaggataattaatgtgtgatttttctggtgtcctcaaaattattagcactcccatgcgtactggagtttcacagatggatttcactttcacatttgagcatttctcagtggtttccagcctcagctctctcttaagcagatgactttagccaagctgagggcagaaaaagctaaggaatgagatcctgtcttgtctcttcctcccctgctccctcccttcctcctaccacccacacatccttcccttttgcagcagatactcgttgagggcttactatgctgcctcactgaggcattgtgccaggtgtcaggaatacagtggtgagcaaaacagacctccagtacttgtgttttgggagattcaaatcaggataccagagtccatgcagtctctggagcagacagcctgagttcaaattccagatcagtacttactatgctatgtgccctcagacaagttacttgtgtctctggcctcaatttcctcatctgtaaaatgggaatgataaaagcatctacctcaaagttatttaatatagggattaaaataaataaagatgtaaagtgattaaaacagagtgtaatatttggtaagtgcttggctgggtgcggtggctcacgcctgtaatcccagcactttggggggccaaggtgggaggatcacctgaggtcaggagtgcaagaccagcctggccaacatggcaaaaccccgtctctactaaaactacaaaaattagctgggcatggtggtgggggcctgtaattccggctagttgggaggctgaggcaggagaatcgcttgaacttgggaggcggaggttgcgtgagtcgagatcgaggtcgcaccattgcactttagcctgggcaatagagagagactccgtctcaaaaaaaaaaaaaaattgtgagtgctcagtaaatgttgttatttacagtcagggtgtgggcagacatttaacaaataataataaataactaggaagttctaactgagataaaggaaagatgatgctctggagagtgtaacgggggttctaatgtagaccggggggtcaggaaggcgtggtgtgcagctggtggtggaaaggaagcccctgcggcagcgtcgggggaggcgggagagtgtggccgctgagctgagctgagctgaggctggagtcccaagcaggggacagactaggtggggcctcagggcatctaagttcacttcattcattttacagatgaagaaactaaggtccagaaagataattgctttgtccagatcacaggctggtgacagagctaaggcaagacgcaggtctccttactcctggtgcactggtgaggaaaccttttaacctcaaactttcatcattttctgtctctatcagatgcaaatctaaatgtccttacacttgttcctggtagggtgccctcgtaccaacagagggcaaatacacgcaagtgtgcacatatatactcccctccctcctccctccctcctcccttcttgagggtggtggtgctcagggtgtatgttggatggtagtgcgtagttgattaggggagaattcaggttgcttctttgtttccagttttaaataatctgacccatgtgtctctttattcatccatcatacctgttcatatatccacatatctttggtttttttttttttgagatggcctctctgttgcccaggctggagtgcagtggtgtaatcttggctcactgcaacctccgcctcccaggttcaagtgattcttctgcctcagcctcccaagcagctgtgattacaggcatgcgccaccatgcccggccaattcctttggtatgtttaaatagagatggggtttcaccatgttggccaggcttggtcgcaaactcctggccttaagaaatctgtctgcttcagcctcccaaagtgctgggattacaggagtgagccactgtgcctggcccatgtatccacatatctactcatccatctgtccatccatccatccatccatccatccatccacccatccacttgttcattgatttattcatgcaatccacaaatatttattgaagggcagatatgtgtcacaaatttgtgttaggtatttttgatggtcagccaaacaaacccggcctctgccctcatgcagtttacagtctgtcagcagcaaatcgaaaggaacatatcctgtgtctacacttccgtgctatcattgtgcgatgggattttaaaaaattcacgagattgttctaacacccacaaggaatgcacactctcgttaatcccacacgactatttctttagtggcttatttgtgtttaatttccaagataggggcggtgatattcccaaatcccatttctctcctaaatctcgttttcacagatgctcagcaaaggatgtagggcgactactgcagcagcacacagcattcaaccaggagtggaatttcatgaactgctctttatttcccttctggtctcttgagtctggttcatcttgtctagagctctgataatctccgagacaaaatatttaaatcttctgcagctctagggactttgaggaaggaatattgtggctaaaatcctaaatattttggaatatcattaatgcaagggttatacagcagatgctgtctggcacaatctccatcccaagagaatgtgtcaatatctttgtatatggaaatgtacatgtatactcataaatttctccagcctcccaattctgtatctctttcccctttgagactgacttttacttcccttctttagcccctgcttactttaatatacattttttctctctgttttcagaaaggggtaaaaaattgttaccataaatgattgatagaggcctgaatttttattgttatctcttccggagtggaaacctgccttttcatagagaacgcagctttaatccaaaggatggactatctaattgttgaatttcaaatataggcagggctgattgagggtatagggtttttcaaacgttcttaaaatcacaatgtatgagtaaaggcataatactgatgggaccacagtacaggacgttttccaaagggcgtgaaagtcattgtgtgacccctgttgatgcctctttattcttgttttgtagaaaaagtaactgatttcttaaaaagcatattaagcccacaccctgtgcccagtatttctttagaacaaccctaaaaaggagacaggattatcttcactttacacccaagacagctgaagacgacagcagctaagaggcttgctcaaggccacacagttaagaattagagttgagcctcagagctggctcttgggtctggaccacctccctgggttaaatacagtcctgtctcagtacacacactgcctcgcctcctgatttttaaggtattacaagttaaacacgcaacaaatagtctagatcagtttcattttgaaataacatagcagttataatgtggatgatattatgcttgaaataaaataatcctgatcatggagcaagcacagtgacctgccttaacagttagatgttagtagagaggacacagagatcatttaaatgctagtaagggcttgtgactgcgttctgaatgcttagtatttttagattcctccaatcgcttctaaccttcagccctgccatggttttttctgtgaccactggaattctaaattcagaaaggttgttagccacctggataattgcacctttgtaacttttaagacaacaacctagaggcagaggataactacaataaatgacttgtaatttcaggtcttagatctctgctttcacataaaaccagctttccacttccttaggttcaccacctgaagaaatcaaagctaagcattaccagaagtcattatctactatttaaagcctgttctaagcgggagacaagccccctttttaggaggcgtgggggcggggggaaggggatccatttctcattttgccatgtttctgcaggaatgtttttaatagggatcctttttacccccagctactctgcagcacaggagtacgactgtatttgaggaggcagcttgacttcatgctccagggagaagtcttttatttcctgttggggttttaaagttgcccttgcttaggtcgttgctgttttataagtcagcctgaatatttaaaggcaggaggcctgttggtctatgttatgttggccttggggcattagaatgacagagcagctttatttaggattgcgaggcaggccatatgtactcaattatcccattttcgaggacttggccatttgtaccacatctccctgcaagccctttcatgagagccactattattattcacattcagtaagacctgagaaatattattagccaggaaagctctcatttacctcgccatctctcgcaacgttactcactgccctcactgcagagcactccttgtgtaccctctaccttaactaagtttgtcccaagaaaatgatgagaaattcttttacgctggcatacacagactaatcaggtttagtgggaagagcgtggcctctcaagtgtggcagatctaggttcacatcctgatctaccggtctgagcttggaaaacattacttcatttttctgaacctcagtttctctgtttgaaaatgggttgaagtggccgggcgcagtggctcacgcctataatcccagcactttggggggccaaggcgggaggattctttgaggccaggagttcgagaccaacctggccaacatggtgaaaccgcgtctttactaaaaatacaaaaaattagccggacgtggtggcgggcgcctgtagtcccagctactcaggaggctgaggcaggagaatgccgtgaacccgggaggcggagcttgcagtgagctgagatcgcgctgctgcactccagcctgggtgacagagcgagactccatctcaaaaaaaaaaaaaaaaaaaaatacacacaaaaacagccgggcatggtggcgcatacctataaccccagctactcaggaggctgaggcatgagaatcacttgcacccaggaggcagaggttgcagtgagccgagatcccactactgcactccagcctgggtgactagagcaagactctgtctcaaaaaaaacaaaacaaaacaaaaacaaaaaaggccgggcgcggtggctcatgcctgtaatcccagcactttgggaggccgaggagggtggatcatgaggtcaggagtttgagaccagcctggacaacatttttagtctctactaaaaatacaaaaattagccaggcatggtggtgtgcgcctatagtcccatctacttgggaggctgaggcaggagaatagcttgaacctgggaggcagaggtttcagtgagccgagactgtgtcattgcactccagcctgggtgacagagcgcgactctgtctcaaaaaaaaaaaaagaaaatgagttaaagttacaaggaagctgattttggcatccataagaaaaatgggcacaacgatcgttgctttttgcgtggattgccacaagaatgtttttggattcacagatgtttaatactacacatcactttctccttctcctacttttcccataggttttcattcaacagatatctgttgattatcttgtggtgtttcaagatgtgtccatctgcattttagctgggcatatgcccaaacagcatagatttcaagctgtcacaacccaccatgggacagatacttcttaaagtgtgtgtgggttgcgttactgggacccccaattgccacaccgctagcatttgtccacttgtaaagattttcttacttgtcttccttgttgaatcaggaagtggacttttacatggtgcatgcagtttttgatgcgcttcctctccctgctccctggaggtgccgcatgaaagcgcttttccctggacgttcagttccctctccactccttgtctctgtgcatcctgcatcttggcatctccccccgtgacatttattcctgtgaatctgaaaacttcctgtatgttttgtggctacattcgtattccagttgctagagcagaggggagcgggtgctgccacgtgaactttggtgttgaaagagcttcaggataaagttttcagaggacctgctatcaaccaaagctacttgaatataattaggaactaggtccagttcctaatcatactccagaggaggataaatccataggctgtccccaagccagttagctctgagtcagcaatgagcttacatcttcacacgcagatgctgtaggtttacttcatatgtccttctgcagtcattgtcctgcacggctcaggtggcagtgacatactggctagggacatggagaggagctctcacaagggatctggaaggtacatcaggcctaggagagaggaacaaatgaaaacggcactggggcttcatggatggtaataattcatacaggagactttccagttagagcactaagtatcaacactatttggagcatcactccaaactgtactcatttcaaactataatgaaatgcgtcttctctgttgtaagatctctctttttttttttttgagatggagtcttgctctgccacccaggctggcatgcagtggtgcgatctcggctcaccgcaacatccatctcccaggttcaagcaattctcctaccttagcctcctgagtagctgggattacaagcgcccgccaccatgcccagctaatttttgtatttttagtagaggcggggtttcgccatgttggccaggctggtctcgagctcctgacctcaggtgatccacctgccttggcctcctaaagtgctgggattacaggcgtgagccaccacgcctggctgttgtaaggatctcttaaatttctcttatggcttcgtctcaaccacagagcaaataatccccttaaaaatcttaagtttttagtttttccagggctttattttgtgtgattttttttttctttaagagatgaggtctcactctgtcacgcaggctggagtgcggtggcagaatcatagctcactgcagcgtcgaactcctcagctcaagtgatcctcccacctcagcctcccaagtagctgggacctcagatgcacaccaccattcctggctaatttttaacaatttctttttgtagaaatggagtcttgctatgttgcccaggctggtcttgaactcctgcctttgagtgatcttgctgccttggactcccaaagtgttgggatgactggagagagccactgtgctgggccttgtttcttaattgttcatttaacaggcctggttggggtgtgaaatggagtccatgtgtgtattttgcatcctctgtaaatatggccgtagagtacattctaaacacagcctttctgatccactggcttttgtgcataccagggtatgacatcgtgttaaaaagaccgttagtgtagtgtattgtttttgtaaatgcagtttattctaagcacactatatgctggaattatttctagagttcatagtggtattatcattaaggtgtatggaaagtatactaattcctattctataggcaaaaacaactggagcacagcaatactactgccttattgaatcttataagaatatagggggaataatacttgaagtgtacaataataataataatatgctcaaccagcaacactaattaccataagaaagatgtggttgagaactacatttccacaataattacacaattgctacactcacttggcaaccttatggtatggctggtatgctagcaaccaaatcttcctgtgtaaaactacttccatgatgttcctgccacaggatttcgtgctgggctgacagaacagaacagtttcctgaggaacgttttctttttctttcttttcttttctttttttttttttttagacatagggtctcgttctgttgcctaggctggagtgcagtggcaggattatggctcactgaacaccttctgggctcaagtgaccctcctgactcagcactctcccccacccccacccacacccccacccccaccaagtagctgggactacaggtgcccacatctggctaatttaaaaaacttttttttaaagagatggggtcttgttatgttgcccagggtggtctggaactcctggcctcaagcaatcctcccacctcaccctcccaaagtgcaggaattataggagtgagtcactgagcccagcccccaaggagacttttctgattgctggtctttgccatcctcagagaaccaggcggggcacccagggtccctctttgttgactcataccttgggttctcttatatttactcaaacataatgtcctgaagttatcagtagtcccttcttattctccagctccctgtaaaggcttaaagcataactctgggaaaatgttttgcttgggtgggcagaaatggtatatttgggtacagatgtgggatgtgaagcctcagctgtcactgcacctgcacccagagtggtccccacttcttccactctttgcatctgtcctgggcaccctcctttatctttgcacaaaggattaagcatttcatgtgatatgccttaaattgattttccttatgagtagggaaagggagtggggatagaagacaattgtttaatccaataatcatgcaagaatgtgttcttgacattaagagaacaactgtagtctgtggagtagcctaagacacagttgcacatagctatgcaggcagttattgatctgaagaatgaaccgtcatggctgctttgaggaataagatgcatcactattgaaggaggccgggagaatactggagagtggtctccaaccctggatcttgatgctgctgtttactgcagccatgcaaaggaatgtgtgcttcaggtctgagtgttcaaggcaggaccagcaaatttccatgaactctctgaccgtaggccacctctgttccattttgcttctttgctcctaaaaaaattaaatatcttaagttagtttataaaacattatactttaaacaggaagtgaaaatgtttttctgtttttaaaagtaatatatgccattgtagagaatgtggaaaatacagaaagattcagagatcacagaattaagaatccaaatgattttgaccagctggaatgatcaagtctgaattagcatgatgatatttaaatgggatgtgttttgctttgacgatttcggcttagggtcctcggagagagaagcctgtgtcccttaagcctagcaaggtacttggcagagaagggcagagtggggcattcctgaatgaacaaatggatgaataaatagaataggatgcatggaattaaggcaggactccctgtgttggaagcaaagctaggagtcacaaggagaacgagcactcaaaaaagagatttctcagcaaggcaaatttacttctgcagaagggtgcttctcacaggactggttgccacgagagcacaccgaacacaggagggaaagggtttttttcattcctaacgcagcttgtccttactgctgtgtcctgcctccattggctggagttggaccgcacaatctaaactgaacccgattggctaacttgaaagacaactttggcgggaagagctgccacagcaggaggggtaaattacagagtgagtagcagacgtgggctctgtagataaggacttacaagggacttacagtccggtgaagaactaaacagcaatggcatctaataaatacccaaggatgagcagttggtttcatcttcatactccctaaggaccggtgggagagttgtttactggacccggaagaaacatgatagaatttctggggcattcactttggaggaaaccatgggatggtctacattgaaggcctgaggaacttttccctcctccgtgctaagttggtagtttccactttccaccacccacttcccacagctccccccaaacacacgtacacatcgtttttcacaccatcatcctttttggtaaagagatgtgtccatttctgtcctgcattagtgagttccttaccaggtgcaaacactgttagatgtcctgaaaaatgtatctcataaaagagctgtagcaggagggagtatcagagaagagagtagctttccttttgctgtctggctgcaaaaccatctggaagcccccgcggaggtgggctgtgtgcccgagccctaccttggagagacacttggttcccttttccagcagatttcttttcctgacagataattctctgttaatcgagggctcctcaaatccgaatctgagcttcctcttctattctcacctctgtgccagggaaattttcttggcaattgaaaccaaagcgataggctggcagtgggactctacttggctgggggtaaaataagcaatgattgcacataattgcagaaaacaattttgaattttattaatgaggtgctccaaacaacatcttttagtccattgtcccacttaacagccaattcaccggagttcattgtgctgtaatttacatctatcttcccccattgataacaccaggcccttgtgttctgtaattgacacaagttggtcattttcaggggtgtttctctctctaaggacataaaataaacaggcttgctggcgagtgggattgagttagcctcatccacagagccaattggctgctgctgcttgacgctcattttccttcctcaggagaggtggcacagccgtgggtacgtgcacagaaagtcctcaggttaaagatgttgaggtggaggcctggggaggcaagcggatgtcgatagtgagaaaacgagacttctttgcctttcctttgcttcttgccacccaggacccaacatctccaggtggagctgatttttagtgtgcgcagccaggctttgggggcagtagaggtaagattcaggggagggtttccaggaggggatataggccaccacctccttcagcatctcatctcaaaatgtagcatgtgtgagtcgccactataggtcccagtgagctcagctagcccagctcctaccttctttgtgtgtttacagcaaaaacgctgtcactgctttcatgtgtctgtttaaacactgtgtggccatcggctctgtgttgggcacttagggagtatgaagatgaaaccaactgctcatccttgggtatttattagatgccattgctatttagttcttcgccagactgtaagtcccttgaggtcaaggatctcgtctcctctgttcttagtatcctctatagaaccgataacagagtggacacttagaaaaacattaacaggccaggcgcagtggctcacgcttgtaatcccagcacttttggaggctgagacgggtggatcatctgaggtcaggagtttgagaccagcctggctaacatggtgaaaccccatttctactaaaaatacaaaaaattagttgggcatggtggtgtacacctataatcccagctactcaggaggctgaggcaggagaatcgcttgaacccgggaggcggaggttgcagtgagctgagatcatgccactgcactccagcctggctgacagagtgagactacatctaaaaaaaataaaacaagaaaaaaaataaaaaaagaaaacattaacaaatggatgaatcaaatggagaagaagagacaagtacagaaacacgtgtagaagtggaaaagaaaaaacaaaaacataaagggagctctaaaaggttacagaaagagctgtgggacatagagagaggtgtttcttttccctggggtgagccgggaagccttcatggaaaggctggcctggagcatgagagattctcatcggtggacggtggaggttgagcatttcaggggtaaattccgagaacattgtacacacataagaaataatgcaaggtgcctatggctttgacttgagcatttggtatgtgcaaggaagtgactggagatcaaaagggaaatgcagattggaaacagggcctgggggtcttgtggcagcttgtgggtggccatgctttccctgggcactgcccgacccaggggactcagctgcgggtggcacgctcggcgtgcaaggcatttgcttactggaaactacacccgtaagaagatactggggtcttgggaaggaaggtgactgttaacctgtgggggtcagcttacagtgtgagtgttggccagaatgatcaagctctccagccttagcccagatcaaaatccagaggccaggaaggatgtaagcctagctctgtgccatgcagctggttggaacagaggtgcagatacaggctccacccctctgggaccatcagctcccagggtgtctgcagcctcacagcatgactctctcccagtcagcccacccccaaggccccgcagctgcagcttctgctgtgctttcattccagggatgggcagggtgacatcaggccacccgcagcctctggcctcagcctctctgcctaggtggcaccatgggctccaaccagccggggcagctgctgggaccaccccgcacaggcccactctgcagtgagggaaggaccgacaggcttgcggctgctggattactcagtatttttcactttaatatcctaatcctgaagttgttctgcgatgtggtgttctggtggtaaatataatcttttggcagagtttttgaactgtctggaacccaatatcctaagctttttttttttttttttactgtatttggattatattgtgggatttttttccccaaggaggaaaaaacgtattttaaaatacaacatgaagtgagtgaaaaaatttgtttaatgcaaataaaagaattgaagctggagggtgagtgtttccagaggaggccatcaccgtaggaggagaagctggactcagagccagggagtcccagagcctgtggtaggccctgtccttgtgtggggagatcagccagttccaagtgcagggaccaaggacattcccaagcccgtcctcagccagctagtcctgcagggctgttcggagcatccaggtcttctgtcattttttcttccccagacaaacctcctagacataggaagccctttcagaagacacatttgcctctccacagctccacccattatcctttaccactggcgatgttctgttcttcttgggacaccacagcgttatttgtctttccagaccaaaaatatatccctcaggagtatggcggtttttaagctcacaccaagggaatgcttgtataggccttgtgtcttcttgtgatgtttcccagcgatgggcctgaacgggagagactagccaactgttgctgaacgcgatattcttttgtgaataaaaaggccctgattccagccaaaccgggatctggtttggctgggtgtgggacgggagcagtcaccgcaagatccccagacatgtgtctgagcccctgtgtggcctgaggctctcccagttagtcatggcagtagaaagtctctccctgctcgagatgcaaaagactcaccatccaaagagttgggccatcccctgcccgctgtgactgtctagctgtctgccccttgacagggcccaaaatgatccagtgctggaggccggctttgcaaacccaaggcagggtctcactgtgttgcccaggctggagtgcggtggcccaatcagctcactgtaaccttgaactcctagactcaagcaatcctcctgcctcagcctctcaaggagctgggattacaggcatgcaccactaagcctgactcatttctttactttttgtagagatggggtcttgctgtgttgcccaggctggtcctcaattcctggcctcaagtgatcctcctgcctcagcctctaagagctctgggattagagatgtgagccactgtgcctggcctcatgataactttttataaagaaaaaaatttaaatcctctgtttcttctcttcctcatcttcccttactttacccacaaacaggggaagaactttctagcaggaaccatttagttctgtcttgggagcacttgtttccttctcagtttcttagaaagtgcagagtctgcttgctggcaccgcaccgtatcaaatgcttgtgatttccattcggcctgcacccacggcagtgggctctgcccgactgctcctcagcgggggcctgggagggggctgaaaagcctggggctggtgggaagtggtactccctccagcatggcggtttggagtcttgaggaagggtccccccttagccgtggcccagggacactgcccctccccacccccagacccttcccgacaacactgcctgcttgggatgctctaggcagaagtgggcggtggggctggcctccatttcagtgcttggtaattttacggttggggtctccgtcttagaagcaatttcccataattccacttgggagagaagtgtctttattgctcatccccattttaaaggtgggtaattgggggcctcaagagattaggagtcttgctcatgataaaacaggaagtggtgggtctgcgatttggaattctgcgttcctgcaggacaccctgccgcccgtgccacctgttctctcccacgtgatgggcgcaaacccctgagaggtcccttttcagctcttgctccattctcagctgttgtgtttccctctccagatcccccacattgacacaagagatgtgatgcctccgggcagttaagggtgaaaagcgaatgcaggttttctctctcctctttgcccccaatcctacgggtgaatgaggcttgcatctctcttttgctaccatcgagagcagcagctcagtcagctaacttccgtttgcctgccggcatgagttcagcgagtttccccttggttttagagccaaagcctgagcacttggtgtaactttgcgtgctgtcgccctgagaggcggcaccgtcgggccccgagtcagccgtgtgctcgaaccgccccactttaccattcctgttcctcaccggtcactctttagtagagtcccgtccacttaaggagcacttcatacccatgaattgagtaaaattattttacagcatatggcatttttcatgactataattacaaaggattctagacgtcattgatgggggttctccctggcgctaacactgagtgagaagttgacccagttagattaaagctcaagttaataaacagcattcacacatttctaggcctgttgaccaatatcctttaaatcagtgtggctttccaaggggggagcaaataaaaccctaaggtagccagagtgctgttttttccaattaaccttgttcgttttgatttcctttcggttcagaacaatttaggtcaatcttagatttttaagaatgaacctctggagggagaggaaattaactaggccctaagggggcttggttaccacaattaaccccaaaagacagactctcaggctggtggggggcctggagaggggccacatgaccacttcaggccatctgctcacatggagaccctggtgggagtgtcctcttttctttcctgctggctggttaaataaactctgcaggctaccacgctgacgaagggtctgcccatttctcatgctccttctgtcttttagccaaagctgtgttccctctctttctgagaagagggatcagcaaacccttaactcccagagatcgctggtggagttcagggatggaagtgcctgatccaggcagacctaaagcagaggtaatggaagagagatgggaggacagagaagaaaagaagggcgtggggcaggaaggcagggccagactcctttctgtgttaggagcagagccttccttcaccggagcctgggcagtcaatcaccctgagagcgctgggagcctttcatcatcatcagaaggcgttgtgcgtggtgtggatgcacacgtgaccgtgtgccgcacctttgttctgcccgttccttactccttatttaggtgatgaaagatgtggtgccccaactttaagttccacttgacgcagaatttcctgattgaggatggagcctggggctaccttgaggtaattacgggatagtcgttgtacctggaacgtacatttttctaaagttgccacacagtaagactcccacagttctgtccacaccccttcccatgacattattgtttcttcaaaagggaccagccgctgagattttgttagcagggaaatctgtttcacaggaaggagggatgtgtagatgggacctaaacatcgaagtttataatttggtgaaaacctgataaatgggaagaccatttgaaatagatgtttcagtggctgggagtcccagatacccttgaatttaacactgctcattacatacctcagtgaccagaaattggagaccagcctgggcaacatcgcaagaccccatctctacaaaaagtaaaaaaaaaaagagtcaggcttagtggtgtgtgcctgtaatcccagctccctgggaggttgaggtggaaggattgcttgagcccaggagttcaaggtgacagtaagctgattgggccactgcactccagcctgggcaacactgtgagatcctgcctctaaaaacatttttttaatatcatcataaactctgtcagaaatacaaaggagcataaagaatgtaacaaacaatctgtatccacaatctggcctaataaataacacattaccatcccatttgaaggctttttgccagacagagggcaagtccttgagcgggcgtccagtgcaggtgtgctgaagagcccagcctcaagcctaaaatgggatagtacaggacatgaacatgtgaggcaagtggatcacctgaggtcaggagtttgagaccagcctgggcaacatggtgaaaccccgtctctagtaaaaatacaaaaaattagctgggcttggtggtgcgcacctgtaatcccaactagttgggaggctgaggcaggagaatcgcttgaacccaggaggtggaggttgcagtgagccgagattgtgctgttgcactccagcctgggttacaagagcaaaactccgtctgaaaaataaataagtaaataaataacgacatagaagacagaatatggtaggcggtaaaagggaaatgctgagcagcagaatgagagtagtcagagttaagaagagggaggcatcttgggagatcggctgaatgagggcaaacttgatgaaggaggtggcatgtcagttgggccacggagaacgggtaggattatctactttgttctgcatacatctccctaacccttcccttaagcttctcttccaaagtttctctgggaagtttctctttcccttcccagactaaagctctttccctgctgtttgtcctctcttgcttggctcaggctatgatggaaaacgtcctcaggctgggtttctgggtgccagatggcagccaccatgggaggaagggtggccgagtactctcagggcccggctccttggtgaccagccaggtgccctccagccagcggccccagcatgacacggtccaggtaacctcccttcaccgtgctattgggagggtgttttccaggactggtgtgaagtagattcagttcccgagaaggacagagctgcctgatgcgtgaacaggcctctctgagaccagggaggccacagctctgagacatgaagcagatgctgctcctcagggcctgtggagagagaactctaccctcttccatttctgaaagccagtggaggcttctcctcctctggaggattcatttcatttgttagttaacgcatccattccttcaacatagattcattccatgtcagctctgccccaggccttatgctgggctcggggtgtggaaaatggaatcgaagctggtctctgctcctgagaggcttacagccccttttagggtatgtgctggatctggaaagctgggatagaagaaattgggtgactgtgtattgtctttgtgcttttgtgtttttttagaggcttctatgatcagaatatttttggactaatgatgtgagttccttagataatttgaaaatgtgcccctatattctctactgtttagagtggtataatgttggcatgacctcatcttcctttcaagattacatattaaaagaaaatttgactttatattaaacgaagtcaaagctgggttcagtggtgagcacctgttgtcccagctgctagggaggctcaggcagaaggatcacttgagcccaggagttcgagtccagcctgggcaacataatgagaccttgtctctaaaaaaaaaattaattaattaaaaaataaataagtaataggaatcagaccccagcatcatagttgtgcatattacctgttatttctttaagagatatcccttctccttgagttccatttttatgggaattacttgctttaaaaaaaaaaaacacacacacacaaaaacttcaaagatacagcattgacatgacgataaacttccatttctttaaataagctccttgcaacatctgatgtatctgtaacaaaaagaagggcaggagaaggagcttgcatttatgtttatgaacagggtaaactcagagacttgcaacctttaccccgccctcccccaccccaccctcaagaagtcccgaagaacaaaaggcaattcagatggcagaatattacttctgttgctgtagcaccaaactattaaaaataaaactgtccctcaaggcaaaacatttcatttattttcctttgaatgagtaacttgtttattaagatgaactaagtggctaaatctagatggtacgcaggcaagaaaaattgatgtattgtagcctttcggaaagtatgctttatgttccctggaatcatctctgggttttaaatgaagaagagctcgtttagtcagatggggagctgctctccctggaaataggcatcacccggctctgcaatgtggaatgtcatatttgaccttggttctttcgcaaattggttctttctgggctaaatcagtgtgttgaaagagttagctaggtttagtgatcttcaaaggaggaccacgttcctgcctcaactgcgtctgcagttttttgaagtgtttaatataaaatcgtttcacttttgccttatttcatatttgagatcactgtgctactgcatctgttagagaggcaacacagagcacagggagccaactgcagtccctggagcttctgagagagctccctttgttgcttcctgacccagcctcagaggcatcccgcccacagggaaggatatttgtctcagcagggaggttccccattactgtctcctcatctggggacacaaatgtgatgtccaattcccctctgattgaggtctcatttgccctaaactaatgcaacttgaaaggagaaaagggtgtcaatggttaaaacaacaacaatgacaagaacaacaaaaacctccacccaatttagcagtgaaacaggaaacgccgtattgaggagagaagcttttagttggaaaaaaaatttctctttagaatttggacaacaaatgactctcactctcttttctggtggtgattgttttatttgttaatttttttttttttttttttgagacggagtctcgctctgtttcccacgctggagtgcaatggcacaatctcggcccgctgcaacctccgctgctggggttcaagcgattctcctgcctcagcctccctagtagctggcattacaggtgcccatcaccacgcccagctatttttttttgtatttttaatagagacggggatttttaccacattggccaggctggtctcgaactcctgacctcaggtgatctgctcgcctcagcctcccaaagtgctaggactataggcatgagccactgcgcccggtcgattgttttattttaatatcacgacacacatattattcctgatttgtaatctcacgatacccgccttgctcgccaagagtcctgagtgctggcctggtaaagatgattatctccatctttcagacgaggaaaccaaagttcagagcacaggtccgcagaacagtcacagctgccagcagttgcacacccacatgcgccatcccatttgatcatcaccaacctgccggttaggttttcttgtcacccgaattttacaaaagtggaacagaagcaccgagagaataaatgagctgcctgagattcatcaactgctggtggaactgggcttagtcctgcattctttccaaagcccccatgcggtgactcagtatttggccatttttctttatcctttttgcctggtgactctgaagagagcccacctacagtccagcatgtctggatcctgtgcagcgggcagaggccagaggccatggtgggggccccagaactcaggctgggaatcccaggggctactccagctttcatgtcaccagagcagtgacattcgggccctcgggggcagactgtgcctgtggcttctcagtggggtgccttagggtcccctcagcagatggatcccatctcctggtctggttagcataagataaacagggatagtagcagcagttgtcactctgagggagggaaggggaagggagggctcaggtgaaaagcagaagggaactctatggctgtctttcttctccctgtttacctgtccacccatctgagagataaaagaagagcagaggagggtgagtgaggaaaaagcaggagggtattgggtgtggggccgatggttttcactcaatccgccgggagatctgaatatcaactctctatggaagaacaagaaccgaggtgtctcttctgccccatttctagcccagggtgaccccaggagctctgcagtgtgccgcatggaatcgcctaagatgggactgccttggaacaaacagtttcaatgtctatttcacatgtgcgctctagctcagaattttaataagcaaatatacatggtaccttgccgtaggggggctttatgtttctaaatctatgaattaataaacaggatgagcctttttaaaaaagggagcttggggcagaatgaaccactaaaaagttattggctcttaactcctgctttttgtagaagcttgacaggcagctgactcagccagacctgaaaccctttccccggttcttgttggcatttctgactttgccatttcagttggcactgacccttccaagactgtgtatgccaggagggagcatctgcccccatctactctctgggaagatgtcctctcccaagagtcaagagtgtcttgttctgaccgtgggttacttctctgtgtctgtctgagaggggaaagcattgtcatcacacaggaggtagcaaatacctacctctttttttttttttttttttttttttttttgagacggagtcttgctctgttgcccaggctggagtgcagtgatgcgatctcagctcactgcaagctttgcctcccgggttcacaccattctctcgcctcagcctcccgagtagctgggactacaggtgcccgccaccacgcgcagctaattttttagtttcaccgtgttagccaggatggtctccatcttctgaccttgtgatctgcctgccccggcctcccaaagtgctgggattataggcgcgagccactgcgcctagtctgctctggtttctaatagaagtaggtatttgcagctaggcgcggtagctcatgcctgtaatcccagcactttgagaggctgaggcaggcagatcgcttgagcccaggggtttcagactagcctgggcaacatggagaaactccatctctacaaaaaatacaaaaaattagccaggtgtggtggcacatgcatgtagttccagctactcaggaggctgaggcgggaggatcacctgagcctaggaggtcaaggctgctgtgagctgtgattgcaccgctgcactctagcctgcgcaacagagtgagatcctgtcccctccaccccaaaaaaaagaaaacaaagaaagaaaccagaacaccaggtgtgtcttcctgagttttcaccctgatcactgcctctcctgccagctccctgctttccagggaagagttggctgcgccaggggacagagcactgactcccacccaggccactgggacagccatatctaggcctcaaaagactatgggggttcctagcaaattccaccttatttgacttctccgaacagcccaaactctgctgggcttcttcccttgccttcataggagacttgatgcagggggcagaggtgagagcccagggggacagctggccttcaggaggggtccttgctgggtgtttccaggagagcttcggcctctctctccgcaccatgttccaggtggcgttgaagaccagtgggtaatttggggggtgtgggaacagaaaatcagaggaacagctagtgttttcttccttgagacttgtttcccctttgacagtttagatggatagtaacaataatcaccgataggaaagtcatcctgactggggtctgaagccttccgtggatgttcccgtctaattctcacagtaaccctgtgggcttttaaggtaagaatgatcactgactccacttttcaccagtgtcggaactgagacttggagaggttcagtgaccagacgatggagtccagggtccagggtccagggtccagggtccggggtccagggtcttcacagcctgtgctccctccccttccgtttctcctcttgctttgggtttgggaagcctccgcggggtgaggtggagagtgcgcctcactagtcaggcaccccgaaggagtaaggcatgtgactgtacaatatcccaataaagcgtgtgggtggtggggatgggtgggcgaggttgagatccattctttaaggcattaaatactgtctctttcaaaaggaggttgtgctgttttgcagctggttttctttaactaccagaaacaccagcattgtttcagaaagccacagaatttccaaacacaatgagaattccaagaggatggggtgtgggttttgggggctggggtgggtatggacaggcttttggggagggaagaccacagcctgagtggttttgtcccccacgggtaatgaatttcacacggctccactgtcctcagttttatctgcaggatgctcaagttgaagcctgggaaagaaggggatcgggaaggagcaggccccagggattacagtggccataaaaaccaaacagtgacccaggacagccccatttggtgtgacctctaatgactgccttccctcagctggtgtcagaggaggcacatggtgtcagttaagttccaaagtgacatttgtataaataagtttgttaatgggaaatgagtttttttttctccctctccaatcttaagaaagtgtgtagcctatatccaaatatttctgaaagagcatcaacagtaacggcaaacaggggagctaatgtcaccaacaaaacttgtgaggtcaacccaaagaaagaagggaataaatgagcaaaactttggaaagagtttctcacatgctgaaaacactcagcaatatttctaacaagcgtggtggcccttcagtcagaagtggcctttctctgaagtttgaagtaaaaaaaaaaaaaaaaaaaaaattctgttcttcctgcttttttttttgagatggagtttcactgttctcacccaggctggagtgcaatggcatgatctcagctcactgtaaccttcgcttcccctgttcaaaccatctcctgcctcagccacccaaatagctggaattacaggcccctaccaccacgtccggctaatttttgtatttttagtggaaatggtgtttcaccatgttggccaggctggtcttgaactcctgacatcaggtggtcagcttgcctcggcctcccaaagtgctgggattacaggtgtgggcacaccgtgcctggcctattcttcctactttttatactttgtgtttgcattcaacttgacaaactcaggcagccttaccagatagcttggtatttgtgagattcagttctgagttttgaagtaaaattttaaatgtgattgtttttatcctttaaagtatagagaagtcaatagccttggcttctaggtctgactgactgttctatggataatggatatggataatgtgaattggaatttatatccgtggaatcaaacatgttcaactgcatgacatgcatgacagaaagtggcacttggcagagacagagagggaaacagtcattctcccgagctgtgaagagtgcaactctagagtacattctcagttcttttatctgtggaggaaaaggcacgttgtcatggttaagaaatatcacatgccaacttagtgacgggggaaagaccctcttaacaaatggtctgggccgggcctggtggctcacgcctgtaatccagcactttgggggctgaggcaggcggatcacctgaggtcaggagttcgagaccagcctggccaacatggtaaaaccccgtctctactaaaaatacaaaaattagccaggtgtggtggtgggtgtctgtaatctcagctacttgggaggctgaggcaggagaatcgcttaaacccgggaggcggaggttgcagtgtgtcgagatcgtaccattgccctccagcctgggtgactagagtgagactccatctcaaaaacaaacaaacaaacaaaaacactaacgtatactctagaggcttacacaattaattgtagaaaatgaaactctgaaagaactagaagaaaatataggtgaatttttatctaatctcaaaatagagcagccttattaaaatacgacagaagggaagcaaaatcaataaatgagcctgaggttgaattacagattacttgtacaagaatattcatagcagcaccacagcaaaaccttgaaacaacccaaatgttgcatattgagagtggataaacaatagagtttttcacacaaaattttcaaaaattttaaaaacaatacccccaaatcgacaaattgtaatgacatataatcctatggctaaactttacaatataatattaagtgcaaaaaacgttacttaatacacaatagcctttcttaacccaatgttttaatatgaaaaatttcaaacattcagtaaaactgaaagaattttctcgtgagtacctgtatgcccatcatcttgtttatccctttcacactttgttatgtttgctttctcacatactcattcattattccctctaattcagcagtcctcagcttggggtgattttgccccccaggaatatctgacagtgtttggagacagttttagttgttacagctgggatagggtactactgacatctggtgtgggtagaggccagggacgctggtcacagcctgcattccacatggcaagcccccaccacagagaatcagctagccccagattgcagcagtgctgaagctgagaacccctgctggaatccatcttattttctgatacatttcagagaaacctggattcactggtatacttcctcctacatatttaagtatgtatatcattaactagatttccatatttatttacagtgtttttcttttgatgtgaaatgtacatgcaatgaaatgcagaagtcttaagggtacattcactgagctttggtcagggcatgcacctgtgtaacccagactcctgtcaggacagaggaccttaccattggcttagaaaatcccccttaactcgtctccagtcaagcctttcagcctcctttccccaggaggcaacaattattctattttttttccaccatagaaaaaagttagaacagtggttctcatagttttgtgtgttttagaattgcatataaatggaataacaacagatgcacgctttgtctgagacttctttcactccatagcacagcagttctgcaagtgtgttctgcagacctcttaggttctccaacactccttcagggggtcccatatgtcacagctattttcattataattctgagacatttttctcctctacactgtgctgacatgtacgtagatggtgcaaaggtaacggtgggtaaattgaggcagtagcaccaaactgtacctttgtcagtgtgttcttcatcaccaccaacttacagaaaaaggagtcagcatcacttaaaaatgccctgggtgaagcagaacagatgtgcatctttttaaatctcagcccctgaatacatgttcttttaatattctgtatgatggccgggtgcagtggctcacgtctgtaatcccagcactttgggaggctgaggcgggtggatcacctgaggtcgggagttcgagaccagcctgaccaatagggacaaaccctgtctctactaaaaatacaaaaattagccgggtgtggtggcgcgtgcctgtaatcccagctactggggaggctgaggcaggagaatcgcttgaacctgggaggcggaggttgcggtgagccaagattgcgccactgcactccagcctgggcaacaagagcaaaactccgtctcaaagaaaaaaaaaaaaaattctgtatgatgtaatggaaggtcctcataaagcacttccactccaccgtagtagcacgattgtcttcaggaagggcgtatacgcagttgtttgagttgccagccaagctagctgcttttctcatggaacaccatttttacctggaagagcaactgaccaactacagttattcaggtttgcgtatgtggcagtgaagctgtcacttcaagggaaacagctgacagcatttgttgctattgatacaacttgaacttgcaaggaagaattagaatttttgaaaacttgtatttgtcaccatgaacttgagagcttcccaataactaacaatttttctgacaagattggtggtgatattgacatatgatttaaaaacataatgacatgcatcaacatttgcaagatatgtataactcactgaataattattttctaaatgacctgtgtaggatattatacagttatacacaggtaaaagttccattccaactgtggcgtagaccaatggatttccatgtagtggagtagaaaaagtttactgataacggtttcagggcccatattgcaactaacctttaagaaactaccacttttaaagttttggtttgtatcaaagatgaatagccataattatctgaaaaggctattaaaatagttcttcatattcctacttcatatctgtgtgaggctgagttttctctatattctccaaccacaaaaacttccagatgagtttccaaggtagtttacaccattttacacttctaccacaatgtctgagactataatagcctttttacaaatttacaacagcaaaacacacaatttcagaattcatagagatgagatactactgtgtaaaaagcaaagctggggactgatacccacaggacttgaggtggcagtaaccttgggtgggagagtcctgcatagccagatgtgtacctggtgaagggccagttaaagcgctgttgtttaaaccaaggagaagggtcctgggggtgccctttgccataggaaactatttcccatagtattagtatctgtggctaacaacatggccacaggctgtactttcctgtccaatctctgtgtatctaagtctgctgaggctgcagattcctgcaaagagcagtcgatggccctctgcaggagggctgatggagaaaacatgcgtcggatgcttacaccggccgtgtcagagaagaggaatgagcctattgctcctgccatgtaatgattcctgttgggagtcagtgactccttttctgtggggctaccctcacccatccacatttctggctttccttgctaggggttcttccctcgtcttccaagtcctgtgcaggtggctggaggccagagaggactcatttggctataatcagaggcattcccctttcctcggtccgtagggatggaagggtttgagcccgagtttatttacccttagcaaaacacaactaggttttattattattattattttagtgcttgggataaaaaggcccataaaaacaatagcataaaacagcttttactgatcaaacgtcatgctgatttatttgtgagtgaaatctgaaccatatggtctggcttcccttaaaatgcacagggggttcaggattaagggaacaaactcttggcaaatttgttttgcgtttcactgagcacatcatgttagaaacaaaatagagcaattgttgagtgcttactgtgtgcaggaaattgtgcttagtgattgatgtccatgatctcgcttcatcttcacaacgatccatgcagtcagcagcgttccccacgaggggcagcagcagtgctgagctcagggccctcatgacctgcaggaaggtgggcaaagtggggaagatctggaatccagtggggaagagtcgtccaccagtgacagcacttccacctaaagtcccctgatcgtgaaagagatgaaactgcaaacgaggacgtgaacttggggcctgtggatcagctggccttctcaggttgcagagagccagctgtgcattgtcttattcccttgtcccagcagagactgaacgctaagtctttcccaccatcaaggcatgaggtttctctctttgccgcatttgtgttgggcatctcagccctcagtctgtattcttgtggagggtgcacctctttttttttttgtttttttgtacacacagttttgctcttagttgcccaggctagagtgcaatggcgcgatctcggctccctgcaacctccttttcccaggttctaagcgattctcctgcctcagcctcctgagtagctgggattacaggcatgcaccaccacgcccggctaattttgtatttttagtagagatggggtttctccatgttggtcaggctggtctcaaactcccgacctcaggtgatccacccgcctcggcctcccaaagtgctgggattataggcataagccaccgcacctggccagatgcatctctttgagtttgggaacgaaaagggtatgatggcagaatcatgtgctgccagtcatgatcacagtgatgttcattctggttcctgggcttaagcttctaatttgctgtaagaaagctcagtgggcttgccctttgcctaagtgaaaccagcttatttccacttttcttcaggcaccctcacggacatccagtgccacggtcctgctttgtcaggcagcatctttcagattcttgaaagacaggcagcttgtttcgaatgacccacagggaatggtgcaccattcactcagtccacccctagcacgggccagtcctatgtcgttttttggcatttttgaggaacagctcccttttcagtaccaggtgacattattacccagatccagttgcggagaggcgtgtgtgtctgtctggttgagctgaaacgtgggcagatcagaaaggaaggaaaactggattaagccaggatttgcttacctggaaggtccagaaagaaattccccttccttccacagccagaggatttcaagtctataatgttgctaaaattagcagtgtaacaaaacttcccatgtgatgtagcacaggttgatggggtaagccagtgtaacatggaaacccactggcacctctgcatctgggcctaaggctgcggcctccgtcctcttcgccatcattggcctctcttgtttcttcccacccctgtcacaccgcccttgaccatggttgtctgtcatgtggattcctcacgggcagagatactaccctctgagcttgctccctgctttgctctggagtgtggaatttaaaacttgtaatgataggagaagggaagaacacagttacagtattagactcactgtttcctgagccactaaatgtatcagactgttatatttgggttattttccaaaaaccttttggtagtcattaaaaaaacactctgaggctgggtgtggtggctcacgcctgtgattccagcactttaggaggctgaggtgggtggattacctgaggtcaggagtttgagaccagcctggccaacatggtggaaccccatctctactaaaaatacaaaaaattagccgggcatggtggcgggcacctgtaatcccagctacttaggaggctgaggcaggagaatcgcttgaacccgggaggcggaggttgcagtgagctcaggttgcgcctctgcactccagcctgggcaacaagagcgaaactctgtctcaaaacaaaacaaacacactgtggctatatttattcatggaaacaatgatataacattcttagacttgccttcaaaggccacctgtattaatagggtcccacgcatgccacttataacatggattctgtagcacattgggacatcggaagccttctccattcactctcccttgctctccctattgttccagcacctcctgagggggccctctttcaggagctttgatcattccctgcacttgtacatttccataactagcaccacctttgtatctagatgtttgcatgcaaggggcatctccaggtatcttcccatgtatccttagttgcccaggcgggcggatcacctgaggtcgggagttcgagaccagcctgaccaacatggggaaatcccacctctactaaaaatacaaagttagctgggcctggaggcgcatgcctgtaatcccagctacttgggaggctgaggcaggagaattgcttgaaactgggaggtggaggttgcagtgagccgagattgcaccaccacactccaccctgggcaacaagagcaaaaactccatctcaaaaaaaaaaaaacaaaaggcagtttccgcagttgtaagtaggactagaggaaagagtgatgataatattgataacaataaaatacaattattgagtgcttactgtatataggagatacacttagtaatttacatgtattatctcacttaatcttcgcagtaatctgaggagataatgttaccctcattttgcagctgaaatgtagcaggttgcttcacccctggaggctgcacgcctagtagtgatggagcagaggcaggagcctagcgtcacctgactccagagttcattctccaatcaccgcatgatactgactcctaatcgtagcctgatggctttaacaagagaaaataaggttaccttccagctagagggatttattattattattattattgtatttctttatttattttgagacagggtctcgttctgttgcccaggctggagtgcaatgatgcaatcttggctcactgcagcctccgcctcccaggttcaagcgattcacatgtctcagcctccctagtaggtcagactacaggcacgtgccacgatatctggctaatttttaaaaattttttttagtagagactgggttttaccatgttggccaggctggtcttgaactcctgacctcatgtgatccacccacttcggtctcccaaagtgctgggattacaagcgtgagccaccgccccctgccggatttatcttacccatgtgtctctgacaggatatattgtcaaattcccaaactgtatttttaggggggttgcaaattttgcttccaaatgatcttctaagagcaggatattctctgcctggagtgatgagggtaccatttctaaaagaggtacattgtagttcaaactcctgcaggtaaggagccgtgacttactaactttcaactttgacacattcgcaggtaagagcagagctacgcactacagcaaaatccaggctgtccgtcagcagctgatgtgcccggtaccttttgtcttggccatcctgttgttcattaatctgatgtatactcactgtgtttgcgtttattttcctaacatttttagcctcatcctattcctataagtgacaggcactgtaactattgaaagtactgattaaaagtagtgtttgattattctgtaagcaaagtaatactttggattaaaacaaagtgactgtcatctgaatcttaatttctgttattttccaaatttctttattcattctcctgttgatgtatatgaagatgaacaaagagagcaaataaaaccactcagaggccgggttcggtggctcacgcctgtaatccccgcactttgggaggccgaggtgggcggatcacaaagtcaggagttcgagaccagcctggccaacatggtaaaaccccatctctacaaaaaatagaaaaattagctgggcgtggcggcacatgcctgtaatcccagctactctggaggctgaggcaggagaatcgcttgaacccgggtggcggaggttgcagtgagccgagatcgcgttattgcactccagcctgggcgatagagcgagactccatctaaaaacaaaacaaaacaaaaagcaaaaaaaaaaaaacaacaacactcagaacccacacctacagtgtaactagagacgaggtgtaccgcagacttggggaaataaatgtcccgaagcagcagagctaactcccagctcccaccaaaaacgatgttacttccaaagatactgcacttgaacaactgaagagagtgctcttgaaataagaaacttagaggcacccaagggatttcagacctatttttgctggtctaagaaaatccaattgatgtaagaatgaccagaaaatggcagcaaacatccataaaaatttgctataaaaagaaaactgccgggcgtggtggctcacgcctgtaatcccagcactttgggaggccgaggcgggtggatcacctgaggtcgggagttcaagactatcctgaccaacatggagaaaccccatctctactaaaaatacaaaaatcagccgggcatggtggcgtgtgcctgtaatcccagctactcgggaggatgaggcaggagaatcgcttgaacccgggaggcagaggttgtggtgagccaagattgcgccattgcactccagcctgggcaacaagagcgaaacttcatgtaaaaaaaaaaaagaaaagaaagaaaggaaaaagaaaacgaaggaaggaaatactccctgaaaacaaccatgaagaaaatgaaaattgttaacaccacctccaacatgaactaaatataattgcacaagcatttaaagaaatgaaagaaaacctaataccagaaatttgaaaaatctcaaacaaaatgctggaaaatgtaaaattaaagattatgacatgccagaaagaaatggaggaaaaagacaaaaaaaaatcatctcaggcatgaagacgagattacaagatgtccattcagattctactgaaaaaaattataagggatattgagaagaggaacgaaaccattcaagacaacaaaaatgagataaagagaggtgaaaagaatcagagaaaaagtgatatataagctaggcaaagaaagtccaacacacaaaattgaagttgaagaacaagcagatggaataaaactaatatttaaaactacaatctaggctgggcgcagtggctcacatccataatcccagcactttgggaggctgaggtgggcagatcacctgaggtcaggagtctgagaccagcctggccaacatggtgaaaccccgtctgtactaaaaatacaaaaaattagccgggcgtggtggcaggcacgtgtaatcccagctacttgggaggctgaggcaggagaatcgcttgatcccgggaggtggaggttgcagtgagccaagttcgtgccactgcgctctagcctgggtgacagagcaagacttcgtctaaaagaaaaataaataaaactagaatccaagaattctttatggaaaaaagaagatgtgactctacatactgaaagtttctacatgcatctgggaaaattgacccagcgtgattaaattctagatgtatcctcataaactttgtggttaaagatgagggagaaggaggaggaggaggataaggaggaagaggaggaagaaaacaaacctctgggcctccagtcaaaaataccaagtcacttaaaaagaaaaaaaaattagattggcatcagccttatcaacagctacgtgcaaagcaagacaaggatggaacaatgttttcaagaaaggtaaggaccatctgaatcaagaattttaaatccagcccatctgtctttcaagtatcaaagttatcgaaaaaaaagttttaatcctacgagaactcagggactactgtcctaacaactccttcctaaagaatatgccagagggttgttaccatcaaacagagagaagactaaggaaatttgtcaaaataactggtggtttgaacaaaagatgcaaaactactttgaaagagggcttcatgtttcagagattaatcggacgtatccatccataagatccttgccaagaaagtttgaataataaaacaatggagctagattgcaatgttttcaccaaatccagaatctctgaagaaattaggatatggctttggcagctctagacgccaaatttgtaaagcaagagaagggaaaaagtgcaagtaattaatggagcttggaaaagacctgaagcaggacagtcaggagtagatgaaagggttttctaagaaaagaagtagaaatgtggaatttggtaaattttattgagaaggcacccgagtagatttaggcttgtagttcttacaaacattaaaaatgttttattgtattaaagagctaatactccttaattatgacttcattatttatgttacagagaagatctagatgcactatttacctccttttgttcctaacctagaaatggtagcaaatacatgtggtttcatttgttttttttttttttttgagatggagttttgctcttgttgcgcaggcaggagtacagtggtgcgatctcagctcaccgcaacctctgcctcccaggttcaagcgattctcctgtcttagcctcccgagtagctgggatcacaggcatgagccaccactcccggctaattttgtatttttagtagagacggggtttctccatgttggtcaggctggtctcgaactcccgacctcaggtgatccacccgccttggcgtcccaaactgctgggattagaggcatgagccatcgcacccggcggtttccttcctttcctccaaagtcacgttgcacatcaatatgtgatttggcaatggttctctttttcactgagccccagtgaagcctcagaattctactcaacgtagcacacgaggcagccattactactctatctgcatttgttggaagttgaaatatatttgctatccctgccctaattgtagggtctgtagcctgattacttggcatcttcatctcacttgtggaaactaacgggattacagacgcactttctcagcaagcgttcattagtcactgagtaaatgacaaacaatgtatgaggctctgggcataatgaaatgattaggacacatttccatcctccaagaggctcacagggcccagaaggaagtgaatgattctgtagaatttgccttgtgaatgtgttactccttaagttatatcgaacattgcagtgatcaagaaatattctactttgtagaaagatcctggaatcacatagaccccaagttttaggcatggcaaaactttatgcacaatttcatatgtaaagtgattttctctgtcctcatccttagtaccttgctactcaaagcgtgacctgaggaccagtggaaagatattacctgggtacttgttagaaaatgcagaattccagtcccataccagatctcttgaaacagaattctcattgtatgaagatacccaggtgacttgtatgtacataaagtgtgagaaacactgcagactcttagtgtccagctagaacaagattgatttgccacctgccacttttctttctccctacacacacttaaaaaaaaatctcttaactaaccacagacacatattccaaatctcatgttctctctgtcataattttcttatttgtaaacttaacatgggaacactattagtacctgtcctgtctgatgagagtgagcatttgctgagatcatgcatctgtggtgttcagtagagtgcccagcttcataaatacatgttatttgtgaatgatatacatgatactagtttaatggaaaattgggacttagaaataatgtttcgggctgggcgcggtggctcacacctgtaatcccagcaatttgggaggctgaggcgggcagatcacctgaggtcaggagtttgagactccagcctggccaacgtggtaaaaccctgtctctactaaaaatacaaaaattagctgggcatggtggcgggcacctgtaatcccagctgctcagggggctgaggcaggagaattgcttgaacctaggaggtggaggttgcagtgagccaagatcgcgccactgcacttcagcctggcctttagaacgagactccctcttaaaaaaaaaaagaaagaaaagaaaaaagaaatttcaacaccgtagcctgttcccagtggaggaaattctgaactttctcgttgttggaactttgtttgatacctctaagtaaatacccaataaaatggtatctaacgcccccctgccgggctgggtggtacccacacttgtacctcgcactcacactcacacacgtcacacacctgtcagggggcacagccccaggtgagcctgagtgctgtgcttgcctcgtggggtgctccatggagatgggtctcccaggcctcagggcttcctgggtgcacctcccgtttctgcgtgcagggagggatggctacaggactgggcgggagaactttcccagtgtggtgaggcgtgctggtgagacagcagtgtttcctgggttacatgtgggcaggactgggttggagatgggcccgcaatttggcctcctgacttggggtgctccagtctgcaggtggaagttcttcccggcggcttgcaaagaagaaaagcgaggagaagggcactgatttattcagcagggcatttccttggtttggctgaaagcttttgacttgcgtgagctcagcaggggagcgccgtttccaggcctcgcaacaccggcctgctattaagtgtttctaagagaataaaagcctgttgtgttaaaaggacttgccctccgccagcagcagtgggcccattagccaatccgttggacacccggtggcacacaggctggctctgcaggaggtcctcctggcctcctgcccctgtgtctttcagaaggcagagtccgtgggagagatctgcttccccatcctcctgcctggtggagctgagagtgtcaactgacactgtcccttcggcctcctcctctgtccctactgcgctgggttgagttgcctgtggaggggctccgcttcccttcctttgtggagctgatgtgttcaggaaaatattcgaatatgttagatttgtataaactaggtcattactctcttgctttaaggttatacttcaaaggccatagttaattaaaggtaggtgtcctttgtcattcaaagtgaacatttgtgtcagttcaataatatttgcttttaaatttccgttaagacatacgggttgggtgtggtggctcatgcttgtaattccagtgctttgagaggctgaggcaggaggatggctcgaggccaggagttccagaccagtctcggcaacatagcaagatcctttccttaaaaaaaaaaagaaaaattagccaggcatggtggcattcacctttaattctagctactcaggaggcagaggtggggggatcgcttgagcctaagagtttgaggttgcaatgagctatgatcacgccactgcactcgagcttgggtgacagagactctggaaacaaagaaaagaaaagaaagggagagacggagggagagaggcagggaggaaggaagggttcagaatatagaaagagggaaggaaaggagggagggaggaagggaataagggttcagaatatagatagaaaggaaaagtccacagaaaactggagtaaagtctgaagctcctgaaataatagtcagtgtgctaagcaggaacagtgtgtacaattttaagacatgagagtgaaataccgggtttgtcatttgcataagtttttgagtagttagaataaacagtgcttatcgccttcccaaaacaccccaccactataagctgcttgtacacactgcatcacttatttttttttttttttttgagacagagtctcgctctgtcacccaggctggagggcagtggcaccatcttggctcactgcaacctccacctcctggggtcaagtgattctcctgccccagcttcccgagtagctgggactacaggtgtgcgccaccatgcctggctaatttttctatttttagtcgagacggggtttcaccatgctggtcaggctggtctcgaactcctgaccttgtagtctgcctgcttcggcctcccaaaatgttgggattacaggcgtgagtgagcctctggcatcacttatgttttaatgaccaaggtgtatacaggtaagaaagttaagcatgtaagtgccaagttcatgtcttggttctatcatttaccagccatgggctttgggcaagttagttttaacctcattcagcctcaacgtcttcaactctaaaatgggaataaatgttgcctccatcatagatttattgtgaaagttaaaggatattgcgtataaaatggcttagcatagttcctgggacgtaattgacaatcaatattataattattaatatgtgaactataggatttttattatttaaaagaacctttaagtgaatttcttataaacctataatgttagcaatgctatgaataaaatttgttttataaggttgaagtttggtatgttgtattttcttgaagcaaattttataatgcatgcgacttgatttttccttgtcctttcctatttttggtaagaatgtctaaacctgaaaacaatggagtgtagaaataaaaatacatgatgcggaatctgagaatgccaatgctaggggaaaggaatactgagtgtgtgtggccgtgagccccgtgggggctgggatttgctcgctgctgtatccccagggcagaacaccatgggtggcatgcagtaggtgcctaatcagtgtgtgttgcttgaataaatgaatgagaccacatagcccaacaccttcattttgtagatggaaacataaggcacagagaagtaaagtgacttgtctgaaattacttaaggccgatctgggactgagtctctggtccgtgtgatcacaaatgcttctaaggctcacaacgtagcagaatttgtctgcaatgaagatcgtggtgtcttcagcagcacactggctggctggttatctctctttcttcctctgtcctctgctccctctttctacttcttcccttctttcttcctcccattcttgcccattgcccctggtggcgtgtcctttgctaaatgagggctagacagatgtaacttacagctctgtctcataccacgcaactctaaagtccatccttagactacgacttagagcagatgtgaatgtttaacctcccttctctctggacatatggcatcatcttatttctctgttagctggtctgccctcctgccacccatttcaaggcactgttggctcctggaagccatctggatggagtttttgtaacgggaaagtgctcctccagcacccaggaagccttgggtgggtgatggtccctgtgatcacccagccgtggtaaggcctgcttcccttgcttagcaaaaccgtaccctggtggatggtgatgctgcagccggggcccagggggtctatgagcatcatggcaaaaaagcctttatgggagctcccagtttactactttcagcctttcggaaacacacacatttccttccattctttactggcaacactgtcttttgtacagactgtatttgtttggattaatacagggagtctgcaaatttttgttcaaataagaatattgtagctgggtgcagtgttccacacctgtaatcccagcactttgggaggccaaggcgtgaaggttgcttgagctcaggagttcagagccagcctgggcaacatagtgagacctcatctctgctaagtaaataagtaaaaattaatcaggcgtggtgacatgtgcctgtggtcccagctacttgggaggctgagatgggaggatcacttgagccccggaggtcgaggctgtggtgagccatgattgcactactgcactccaacctgggcaacagagcaagaccctgtctcaaaaaaaaaaaaaaagttgttatttggccaggcatgctggctcatgcccgtaatcccagcactttgggaggccaaggcaggcagatcacctgaggtcaggagttcaagaccagactgaccaacatggtgagaccccatctctactaaaaaaaatacaaaaattagctgggcatggtggcaggcacatgtaatcccaactactcaggaggctgaggcacaagaatcacttgaacccaagaggcagaggttgcagtgagccgagatcgcaccactgtgctccagcctgcgtgacagaaacttcatctcatctaaaaaaaagaatattgtcatttgagaatcacaaaactctgatctttttaaacataggagagtgatatagagcagtgcttctcaaactgtatttgatgaaggaccagttttcaaattttccatatcgtgttgcagatcaacctatccatcaaagacaataaaaatgaatagaaaaatggaaaaaaatcccaaacccaaaagacattaaaaagtcctcaattttttttattactcagaacaattgggctgggcatggtggctcacacctgtaatcccagcactttgggaggcagagacgggtggatcacttgaggtcaggagtttgagaccagcctgcccaacatggcaaaaccccatctctactaaaaatacaaaaatttagctgggtgtagtggcaggcgcctgtaatctcagctactcgggaggctgaggcaggagaattgcttgaacctgggaggcggaggttgcagtgagctgagttggtgccactgcactccagcctgggtgacaagagcaaaactgtctcaaaaaacaaaacaaaacaaaaaaaccccaattgatctaaaattatacatattgctgcaaaaaattctaaatgcttagtctcaatttctacacttccttctgggtgttggtagcaaactctctgtagacccgactttgaggagctcttgatatggagacgtggtttcttacgtctaatttcgttttccaccatctactgcaagagttgtattttctgcctcacgtcgctgtccttctcccagcccattcattttacttcccctctcagaatggcctgtgtagtgggaggcccaggacatttagtggaagatggacatgggcaggagttaacgcgtcctccagagaatgcctccatgttcttccgtcatccgtgcagatatcaggctgcagtcccgcagaaaatgatgatgttgcacaaggcgaagaagcagatattgacatgaggccaataaaacaggtcatgagccaataaaaatgaccatctgattcactttccagaagagctacgttttaatgatttactagaaagcgaattctttctttgcatcaatttttatcaaaaacttaatgccattaataggtgaagaacacatttttgattcattgactaggattatggttagtaaaatgattttcttttgtttgggttttcattgttgttttagacagagtctctctctgtcgcccaggctggagtgcagtggcgtgatctcagctcactgcaacctctgcctcctaggttcaagcaattcttctgctttggcctccatagtagctgggattacaggtgcccgccaccacgcctggctaattttttgtatttttagtagagacgggttttcactatgttggccaggctggtctcaaactcctgacctcaggtgatctggcctcccagagtgctgggattacaggcatgagccattgtgtcctgaccagtaaaatgattttctgaatgttttagtgtttttccttccaaaagttgtctttcctgacagtgtatttttattttactatataaagagtcactttccggccgggtgtggtcactcacgcctgtaatcccagccctttgggaggccgaggcgggcggatcacttgaggtcaggagtttgagaccagcctgggaaacatggagaaactctattaaaaatacaaagattagccgagtgtcatggcgcacacctgtagtcccagttactcaggaggctgaggcatgagaactgcttgaacccgggaggcggaggttgcagtcagccgagatcgtgcttccagcctgggcaacagagtgagactctgtctcaaaaaaaaagagagtcatttcccgtgaaaaccacgtggtctttctgcatccctaggggttattctggtgcctaacgacttcctgagtccactttcgccgcttccatggccacattcgctttatttttctcttcttaggggaggggaaggcagggcatagttgctgtaatttgtagagttgggttgatcagtcgcaccttagtgtatatacctcagtgtggaaatgtctgaaaattgtaactttgggtttgtagaatttgttttccatttcataagtcctggaattttaaagtcctgcattttcggttcgtttagaggaagctgcatatacacatacatgtacagacatacgagtgtgtatagaatgtggagaaataccactgccctcagactctcgtgagattatatttaatctttttccttctagggaaaatttcaaaaaggtaggagggggctcgtgatatattaacatttttaccaaaagctctgttagggctggaggggagacagcagagaagagcaacaagggaagttttagtgagatatagccatatcagaaaagcaacaatacatttagggaagctgggagaggcaggagatgccgctgtgggagggagctggaaggctacagggacctgccagagggaggctggaggctgtgggccaggtggctcagggaggctggaggaaggtcagaaccagcctggcagagagcctgaagtgacttggagaatgaggtggaaagaaacttgcttcctctgtgccctgagctcaaagataaaggactctggcccggcccaaggtccctgcccccagagtccccgcccagggatcatggatctccaccttttcctactcttgggtctcacagggcctggggattgggaaacagagtattgccaagccttattaagcagctgtttattgggtcagaatacacctgtcaggaaaatcatcggtagtgagcagtttcttcccgttaccagtaaatgtcggaatttcctgagtgcagctctgaaggatttagaggtgtcattcccagagattagcagggacctaatctgtgaagtgaaggtggaatgaccaggatggccagagccagaggaagaccacgaagccagagggtgccccgacagaggaaaagcggccggtgggttttagatcctcatttggccagagggaggcagctggatcggcttctccagagcctgctggctggaggttggctgtccgtggtggtctggttctaagtaggagaagaggtggaacttggagctgggcaccagctggcactgctgtgttcagagcatgggaggaagcagcagcagcagaatcccaggacccccaaagtgggagaagggctcccaggtgccttacaggtcacagtcgagggccttcttaaaagctggcccaaacctgccctttccttgcagcccaatggcctcaggagacagtgactcacgctgtgtccacctgtgtcatcctgtggacagctggaggtccacgggaacagctgctatggcggcggacacagccccgtccagggcccatggcagccccagctggctgcccgctccctcctgtgggcagtgcttcacagcggcagcgggagcactgggtgcagcctctggaaggtctggaaggtgcttgctttggggactcggccctggtggatccccttagcctgtggtatgagctcagtccccatttctcaggtggccttcaaggctcattcctgactcacccagcctcatctccagccattcgagatgcaggcgttgtcattccttgaaattctcacgccttctagatcctctgtgcttttcatcacactatttcctctgcctggaatgtctgtctttgcctgggaaacaaaagagaaaaatgcctgactgttagatttaaaatagcatctcaaagctcacgttatttttaaatatttcaaacacatagataagaatagagaataacataatcccagtgctttgggaggccatggctggaggatctcttgaggccaggagtttgagaccagcctgggctacacagcgagaccctgtctctatgccttccccccccaaaatagggaacatattgaatgtccggcattagcgttatcagatcttactgctatgccgtatgtacttcaaatctcgttttattttaaagaatgaaacaataaagatttagctgaggcgctcagggtgccctttcccactcctggtctccttccttgcaaaggataatgtctacccttgtgttaactagcccatgtatggtgttctcatttgagctagatattctacctaagaaatctaaacacatacattgtattggactaataaaaagttgtatgtaaattatatattgtgcatgaccagcaattggccttttcactcaatatgatgtttttgaaatttattcaagttgacacatgtatagtattagcagctgcatggtgttccattgtatatatatgtggttttttgtttgtttgtttgtttgtttgagatggaatcttgctctgtcgcccaggctggagtggagtggcgtgatctcggctcactgcatcctctgtctcccgggttcaagtgattctcctgcctcagcctcctgagtagctgggattacaggcacgcaccaccacaactggctaatttttgtatttttagcagagacggggtttcaccatgttgctcaggctggtctcgaactcctgacatcatgatctgcccgccttggcctcccaaagtgctgggattacaggcatgagccaccgcgcccagccatatgtggtttatttacttctcctatggatggacatttcggatttttccctcagttacctacagtgctgctgtgtgcattcttgcatatgtattcttttgcacctacatggaagttctctgatatattcagaggagagaggaggtaaactgtcaagtcataagttgtacatgtcttcaactttacaacttatcaccaaattgctctccaaagtggctgttccagttggacatgcccatcctgtttctcccttgccaatacttgtctttatcaaactttaaatatttgccaatcacatgggtgagaagtgctatctcattgttttaacgagcatctccctggttcctggtgagattgaccatctttgcaaatgccagttgtgtttccccttccatgacctaaatgttcacatcctttgcccatttttccatttgatgcatatgttgtccctactgatgtagggtatggattctatatatatacatacatatatatatatacacacacacacacacacacacacatatatatatacacacatacataaaaggatcttttgttggctatgtgcataacgtgtttctcctcccagtctgtggttggtcttttcacagtgtttaaagagtctttttaaacaaaagttttaacttcaataaagccaaatttacccccattcttctgtattgcttatgctttttgagtggtttatctaagaaatacaaactccatctgtaataaaaatacaaaaaaaaattagccaggcatggtggcacacgcctgtagtcccagttactcgggaggctgaggcaggagaatcgcttgaacctgggaggtggaggttgcagtgggccgagatcatgccactgcactctagcctgggcaacagagtgagactctgtcttgtaaaaataaaaaagaagaaaaagaaagaaaggaaaggaaaggaaaggaaaagaaagataccctttctatagccttctattttttatttttcccttttttgacttttgagacagggtctcactctgatgtccaggttggaatacagtggtgtgatcatggctcactgcagtctccagctcctcactcaagcaatcctcttgcctcggcctcttgtcctgttgagtagctaggactacaggcatgcaccatcatgcctggctaatttttatttatttatttattttttgtagagattgggtcttgctatgttacccaggctgatctcgaactcctggcctcaagcaatctttccaccttagcctcccaaagtgctgggattgtaggagtgagccactgtacctggcctccttttatatttttttctaaatatcattctatatgttcttctaaaagcccatttgttccattactctgaaagacaatccaagatacgtcagagtctcttcttgggaaatatggaatgacgtcttgcatattgtcatgatatgtagtgggtgggtaaaatccgtgaaagggtgagtattttgcttttaaagttctgtgactatgggatggcactctaagcttcagctgcagttgggaaagacttttgctgtagaccaattttattgtacttagtcgagttctagagggagccaggcccagaaaatgagggggacatttacgtcatggaacacagaggaagactcatgaaatggcaagagaccctcccctcccctgacttccaatgtgacacccgtcttctctgtcctctctcttcatactgttgtcttaggtgttccttgtaaccagacttcaaactatctgaaaacgtttgtgagaaggaacacacagacacgcacactcacacacacacacacacacacacacacacacacacagaactgctttggacttggatacttcctagtcctcctgttattcctatgaacgattccttctgttcttctaagtcccttctactttattcagagattatcatcatgactgctcatgatggcagtcagtttatccagatcacaagtcagaagggtgaaatcggctgaaaagaggatgaaatgttttaaacgctcaagaatttccagtcaccacagtcctgaggttcgttgtttcttttctgtctgaaagctgtagaactccatgcagggagcctgtgagcctcggtgggctgatgaaacactcagaagaaaaaagaacttgatggaggcagttgcctgtttagcagacgggatctgaatggaaggtctgagggtctgcagatgtcagagctgtccatggctttgcctggtgtctgtctgagcgatctggcctttgtccctgatgcctaatctgcctgtttgtctctctgagatagccaccaggtggtctactgatgatcaaagccctcgatggtgcagactgctgtcacccctcggctgagtcccaagatggggagtttgagaatgccgagtcttgctgttgccctttctgaatggggtgatgcctggtcagatttcagtttcctggaacatgtgttaatggttctcagcagagggtagggctttatttacacacctggctcagtctagactgcagacctttcaaaggtttgcagagcggccgggcgcagtggctcacgcctctaatctcagcactttgggaggccaaggtaggcagatcacctgaagtcagcagttcaagaccagcctggccaacatggtgaaaccccatctctacaaaaatacaacaacaaaaaaaattgctgggtgcggtggctcatgcctgtaaccccggcactttgggaggccgaggcgggtggatcacgaggtcaggagttcaataccaacctggccaagatggtgaaactgtctttactaaaaatacaaaaaagccgggcgtggtggcgggtgcctgcaatcccagctattcaggaggctgaggcagagaattgcttgaacccaagaggcggagattgcagtgagccgagatcacactactacagtccagcctgggtgacagagtaagactccgtctcaaaaaaaaaaaaaaaaattagccaggcatgatggcagatgcttgtagtcccagctactcaggaggctgaggcaggagaatcgcttgaacctgggaggcggagcttgccatgagccgagatcgtgccactgcactccagcctgggcgacagagcgagactccgtctcaaaaaagaaaaaaaaaaaaaaaaagaaaggtttgcagagtaactttgtgtggctttcttgatcaactgtgggtggacttaagatttacagccgaataaaggacttaaaaatacagccctggaatttttgcctcttcaaatgtccttcttgaaaagaacccctttcagaaagttccactttttaggtggagccccctgagccaacgctctgctcttcggaatcattgatctgtctggggatgagcaatgctgttgtcttcatcatcctcgtcttcagcagcatcaacagcaaggtgaatatttagctggtacacatacaggtggccacaccactcaccacctgttaaaatattgagacactgccacacgtgttggtcaagagctgctgctctgagtcccagtctccccaccacccaggccctgcctctgggatctctgggacctccccacaaatcagcaatgaaagcgttggcacctgaccccacagtgggtctccagggctctgctcagcactccagctggtttatattctggtaggaagacagacacccacacacccactcccatagtcattgaggaatccattctgattgatgcccatgccacagagttgttaaatatcgtgaatttcaagtcatcctaagacaaaaatctgggctcttttctttggttagaagacaaaggaattccagcgtatgcagagctgtgtactgggttctttggagacattataatatatatagatgggccctgaaaggcttgcttgtaagggcagaacacacacacacacacacacacacacagacacacacacacagacacagacacacacagacacagacacacacagatacagacacacacacacacacagacacagacacacacacacacaaacttaaaaaagcaacatgtcaccacattgacactgatgtagattgtaagtgcagaggggccagagggtaaagatctagacagattgttcagagtgtaaatcacttagttttctgtgttcttaacagtgcctgccactgtggctgcttaggatttcttttctttttttaatatttaaaattttggctgggcatggtggctcgtgcctgtaatcccagcactttgggaggccaaggccggtggatcacttgaggtcaggagtttgagaccagcctgaccaacatagtgaaatctcatctctactaaaaaaaaaaaaaaaaaaaattagctgggcgtggtggtgctcacctataatcccagctactcgggaggctgaggcaggagaatcgcttgaacctgggcagggaaggtggcaatcagccgagatcctgccaatgtaccccagcctgggcgacagagcgagactgcatcttaaaaaaaataaaaataaaatttgagatgcttggaggaatagaaaattggtgaatgtttgaggcaggacgtgctaacgaagagaagaggctgacattctgcccgagaagcagggcacgatggcgtggcagccctgggctgtcgctggagcgagcttgtttatggaagtaagaggaagtgggcccgagggatgcagagcagacttgcagggtcctgaaggctggaaactagattttgggtgtattaggaaaatcatgaagacatgttgaagaactatcagccatctcttaaactagaaggcaggccttgccccagaacaattaagtcatctgtttggagaagagggaacagagaggagcctcgtggcctcaaccactattttatcgtgacattctgcagaaatcctggccattttttcttttgctctctgtacctttctgaacttctctgcagggaagtgttgcagcagatgccctcagctcaccagagcccgtgttagccctggttccggtcctcagtctcactgggtgataagggaagatgagggaaaactacttctatcagtcacagcaccaacagtgccaacacggccgtgcacatccaaatggcttcattatgctcaacagcctgggtgagtctgagccttacagctaagatgcattgctttttttttttccctcggtgtgataaaaatgctggtagtatacttttataccccaaaataactgagcacattgagaaagacacggcgacctacttgggaacttcagcagtattagctggaacgctgtctggacagtggaaggactttttgcagggagctgccgtcagaggactgagagccagcgttcagcacggcatcactgagggcgcctggcatgcctccgcctgcccgtgagaaggcacgcttaccttctagatttctcacactcctccagagttgcattctgcttccgtaactgtcctagaacagcatttcctgtatgaagatacacaggtttggccagagactgaactctggttacttcctgaacttgggaacaatcctcaccaaatccactaactattaatcatggtcacagacactctcttgcttttgcatgctctgctgtgatgaagattgttgacgccaagaactaaatcgtaatgagcccacgtgctcttcacagcaggctccgataacactttgtcgcttttatggttaaacctcctcgtaaaatctctctttaagcgaacacgtgattatccccacggtagtttaaactgaacttgatttgtgagtttatttcttcttttccatctgagatgtttgccaatatctctgacatatattctcctatggaaatagccagaaaatgatggatcgaggaaatcaagtgtaaatcagtctgtacctccgagtggaaaccagtcagtgggatgtgaatatacttaatatgttctgttgtcttgtgtattgaaggagccttcatggagattttatatctctggagaaactcctgcaggttgcctttttagagagaggtttgaaataagaacaaagaaagtgagttcgctttagctgagtaaggcagggggcaagtgaagcagtgttagaggaggtaatgtggcagctgtctataacaggtggagcaaggtgatttttgtgtgtttgtttgtttttggtttatttttgagatggagtcttgctctttcgcccaggctggagagcagtggcatgatctcggctcactgcaacctctacctcccaggttcaagcgcctcctgagtagctgggattacaggtgtgtgccaccatgcctggctaattttttgtatattttttagaagagacagggtttcactgtgttagctgggatggtctcgatcttctgaccttgtgatccgcccgccttggcttcccaaagtgctgggattacaagtgtgaggcaccgcgcccagccacaagatgagttttaatggccaaacagaattcctgtttcacaacaattgacattgtgtcggctcccttgtttgtgcatatgtgttaatctattttttttttttttttttttttgagtctcaccttgtcgcctaggccggagtgcaatggcatgatcttggctcactgcaacctccacttcccgggttaattatcctgcctcagcctccctagtagctgggactacaggtgcccaccaccacgcctggctaacttttgtatttttagtagagatggggtttcaccatggtggccaggctggtctggaactcctgagctcaagtgatctaccttcctaggcctcccagagtgttgggattacaggcgtgagccactgcatcaaaatgcaatttattttggatactgaatgcacagaactgatctgggaagcattgctttgttttggagtttgtccaggacaggttagaataatattaacatttgatctgaaggcaaccttacctagattatctataaattgttataccacgagacagaagaaatcctattttcccacttaatatctgtgttaaaaattatcctccaaatatctatcaaattttaaaaattatgaaacatattaaaaaatttaaatctataggaaataatataacatgatccgtgtagctttcatgcatatttagcatgttgacatactttcttcagatgtgttttttaatagaaacattattgtcgaaggcttcttatttccctcttctttccatcctgttgcactttctttttccttagagataaccaaaattagcctcctacatacttttatgggtacctacatctctttgtaggtaggcgtattatatatagtaaagtacaataccgtatattttgtatgctttaaaattatttaatatggtaagatgctccacatatcagttgagaacttgacagtttcaagatttatctatccatttggtttatttgaactgtggtataactttctgatgaatgactgtaccttgatttacttagcttttcttcctgtgatggacactgttacaagcggtgctataataaacttgtgcaagtaactcttcatacctgtcttggtcatgtaatgtgctggctcacaggacacatacatagtcttcagcttaactagatgttgccagtttgttctccaaaatggcttctctgcaaatctcactaccattccatattttcagattctaaaatcctgccatcctcagatgaggataaaacgatgttttcttgttttgagatggaacatcttttcatagttttattgaccatgggagttttctcttttaagaattgcctattcattttctttgcccgtgttttttctcattgtattgtcttatttgtgtccattattgtaattgaattttaggatatttgaatgtaaatcttttgttatcgtattgggggttcccaagaccacttctaggctcagtaactcactaggttgctcaagaggctcagcctatagtcctactcacagcaaagacttattacagtaaaaagatataaagcaaaattagccaggggaaaaggcacagagggtggagtccagaggaaaccacgtgcaagcttccaagagtcttctccagtcacataggacacacttcgtttccccagcatcacattatgacaacaggtgtgaagtgtgtctaccaggaaagctcattagagacttagggaccaaggtttttgttgggggctggttatataggcaacctctctgccttgcctgtacccaaattccagattctcagaaggtaagcaggtgtttagcataaaccacactatttgtacaaatatttaggcacagtgagtcactcttaccagttctaggaatggtaggaaccctcctgaaatcttaagttctcagatgccagccaagagtcaaccttgcaggcaggtcttctaactttctaattttaacttttctctgcacggttatgttcatttcaaatatcttctcctaatctgtgtttatattgtcttttgctcatccagcagtaatatctgtctttttcaacgctttataattttaatatcatgcaaaaaaatccttgcctaccccattcataaaggtagctccttatatctttctctaataattttaacacattcctttttgtatttaagactgtaacctaactggaggttatttttgtgactggtaaaagatatgaatctcatttatcatttttggcatagaagtagccagttgtttctgcactgtttattgaatggtctatcatatcctcatggatttgtgatgcttcctctggcataccaagttctcctgtttgtgttatctatctctgaactaaattccacaccatttaattgagtttataaatcttaatatttaatagcataaattgtcccctgccttgtcttattgattcttggctcttatgactggcttgtcaagttctgccaaaaatatatatatatggttaatatatattaagattaatgtatatgaatttttctgtcagaattgcttggaatttttagattaatgtaaggataatttacatctttacaaatatctggtcttggcttggcctggtggctcatgcctataatcccagcactttgggaggcagatcacttgagcccaggagtttgagaccagtctgggcaacgtggtaaaaacccgtctctgctaaaaatactactaaaaatacaaaaaattagctggatgtggtggtgcgcatctgtagtcccagctactagggaggctgaggtgggagaatcacctgagcccaggagtttgaggctgcaatgagtcaagattgcacctctgtactccagcctgggcaacaggagtgagaccttgtctcaaaaaaaaaaaaaaaaagaaaaaagaaaattggttttcccatatatgaacatattatatagctcttcattcatgtatgttttctttattacctttcggtaaatgtttatattctccataaagacattaacatgttttgttggaattcttcttaggtactttagggttattatttgttactgtgaatggattgttctttttaaaacttacattttctaattgattgattgctgttgacctgtatgggtttttactattaatgagatatataacaaactgaactcttttattaagtctaataccttgtggatcctcttgaatattccatgtagattatcatgtctgcaattatgactcttttgtcataattgcagataatatgtctgcaattatgactcttttgtcataattgcagataatatgtctctttctttttaatcctaattcctcttattgacttttcttgtcatattcttctagctagggtctctagaaccatgttgaatagaagtaatgatggtgggaatccttgtcagttctaagttttgtaagggactgcttctatcacttagccattaagtatgatgttcactgtgtgatatgggtacacatgctttatcaaggtcaggaaatttttgtcccagtttgctaatattttttaaatttcataaatcagaattgaattttatgaaatgttttctctacatccattgaggtgataatttttttcttaattttttttttttttttttgagacggagtcttgctgtgtcgctcaggctggagtgcagtgacatgatctcggctcactgcaacttccacctcccaggttcaagcagttctcctgtctcagcctcccgagtagctgggactacaggcgcccaccaccaagcccagctaattttgtatttttagtagagatggggtttcaccatattggtcgggctggtctcaaactcctgacctcaggtgatctgcccgccttggcctcccaaagtgctgggattacaggtgtgagctactgggccctgcctcttaatatgttaatgtaggagttacattaagagatttttttagtgttaaatgatttttatattatttgcatcaaagatgctttggtcattattattattttaaaatatattgctggatttgacttgctaacatttcatttggaagtttcacatctgtttgctagtgaatgtggcttataattttcttttcttgcactcccttcatttagtttggtttcagagtgatactagctttaggaaataagttggggtatgtttcctctttttctactctctgaagagtttacgtaagattggattaatacagtttggtaggatttgtctctaaaggcatttggacatggggattattcatgtgtcaattttgaactactaacttaattttttaaaatggttataggacttttcagtttttatatttattcttaaattatatatagattaaaaaattttgttttaaattttcctgtctatagactttgaagtcctgctttttttttttttttttttttttttttgaaacagagtctcgctctgctgcgcaggctggagtgcagtggcgcgatccctgctcactgccagctccacctcccgggttcacgccattctcctgcctcagcctcccgagtagctgggactacaggcgcccgccaccacgcccggctgatttttttgtatttttagtagagatggggtttcaccgtgttagccaggatggtctcgatctcctgacctcgtaatttgcccgcctcggcctcccaaagtgctgggattacaggcgtgagccactgcacccagctgaagtgctgttttttttctttaacattatgggcattttctagatcattcaatatttactgagaagatgacctgtaacgcattgactttagcagtagtttttctttctgattaactttatttctagaattttattaggttgcatatgtcccatggatagggtggcataagtggccgtgctgggcacatggtagacatatagtaatttctgctggatatcgtacccagaactactcaggcgttgtaactttccagagcaaaaaattggaatttcctcatgttttacagggggagggtaaaggcgattctatgaaaattaacaaagggggttgggggaggagggctttcctttttgctaaaggaaaaataacacattcttttcgaatgatgacttatttttgaaaggcatcctggctgaaatgatgagctcaggttttgggtctgagcagttcctattgaaagatacttgtggagatttccaaaagtgcatataagaatggcaggttcttagttctgggggaagagtgactggggaggaaatacgtcttccccttttattgatctcagttacgtgctatgacatcacatgtaattttttgtggagctgttctgatgccccacatgaggcccgtgtcctttgctgccagtgcattccaagagggctgtaccctgggggctatgcaggcagctattcttgtgtgggcttttgccatgcctgtttcaggtttggaactgtatacctttcaggagcatggcttatgacatagcaattccattttcttaacaaaaacgaaccctatttttactttaaaagtaaacattccctctgctgtggtttgaatgtgtccctgaaagttcacatgttggaaacttcatcctccgtaacagtgttaagaggtgagacctttaagaggtgattaggtggtgaggactcgccctcatgaatggattaatgtcattatcttgggaattatcttgggtttctgataaaaagatgaggttagcctccttctcttgctctctcttgttcatgtgatgccctccaccatgttatgacccagcaagaagaccctcaccagatgttggcttcttgatcctggacttcctagtttccagaactgcaaagaaatgagtttttgctctttataaattacccagtccaaggtattgtgttatagcagcgcaacatgggccaacacaccctctatccatctctccaccggccaaaatcaactaagtgtccagcttcattacagccagtgtcctttggaggagaagtctctgaacattcctgttgagattcctgattggagctgtgtgaaacccatttagattgaaatcagaaacatggtcaggttgtgagttttccttttggagagccctcccttattttcacatgctcattctcaaaagcactttgtacatcatgtgatttgtatgttttttgcttggtacgattacacagccctttacaacccactgcccacacatgagctgacccagtggcttcgtgctgtaaaggcagatccagaaggcagtgctgccaggctctcttacaaaaatcagtttgtcttcttttgagatattcctgttctgagagttaaaacaaactcttgaaggcagcagtatattatagatgcaaaatctcacataaaaaccatttaagaaaatctggggacatggaaattgtttttttccctttaacaagatggtaccactaatgtattcttatttttttgcccagagagtagcaatttctaaattgttagacatggttcttctttggtttcacataacccattccttcatggtacttaaagttagtaaatggttgaaatacttccttgagaagtagaaatgaggaagcatgaagagattaaatgagtcacttaaagccactgtaaggaagttttccttcctttttattggtttctgcctttggtgttctgctgcttaccctccctccttcctacctgccttgtgctggaaagggccgggatttgggtatgcccttctcagctgtgtgacttcgaacaagctatttgacgtctcaaggtcttacatttctcatctgtaaaatctaagatccttctcttcaaatggctcccaggtcacccctgctgcagaccaggaatatggctaacattttgggatttgacatcaaatcctgagttgactttacgtaacctgggtccatgacatgtactagctgcaaacaagaagctgatgtgcacattgtctcaggacacctggaagcaaaatgttgaatgttagatttagaagggaccttcatcttccctgagtccaacagccccatcgtccggatgaggaagctgaggccaaggttagcccttgagggctgcagtgctgaggtcctgtgtccttgcccctggccagtgctgctcagccttccccacttttaggagagttggttgactttttgtaagacccaggtgggtataaaccaacaataacattctgagctccccaaccaactgaatggacctctcctctccgcgaagggcattctaaagtcagcctgaaatgctaatccaggcggtgatgggaatgggctgtgggacgtgcctccattacagcctcctccccttggaattcaggcacagctgaccagcattcacattaaaatagagacttcagactgacaaagcggactctttgtagcaatgagataccaacttgacagatagccggccccaaaagaaataaaagtattttgcctcaaaatatatttctttgatgtattttgaaatgtccctgcaaagctgtctcttgtggggaaaatctacattctgtggagaatctccttcccttcccaggtctttttcctgatccagtagagaattaactaagaatctggcactttttgaagtctgataagaaacatttaccatctattctctccaaagcctgctacctggaggcttcatctgcataataagaaccttggtttccataaccccttatcttaacccagacactcccttctattgattccaggtctttagataaactcaaccaattgccaatcagaaagtgtttgaatccacctgtgaccaggaaccccctcagcaatcctctgagttgtcctgcctttcaggaccaaagcaatgtacatcttacatgtattgattgacctcttgtgtttccctacaatgtatacaaccaagctatagcccgaccacttgggcacgcattctcaggatctcctggggctgtgtcacaggccacggtcactcatatttggctcagaataagtctcttcaaacattttacagagtttgactccttttgtttacatgggattgacagatgatatcccctgcctcgagggaatacgtgtgtgggcatctgaaatgtcatctcagctcacctctcaatgagtgggaagagactggaacacttttctccatggtccttgaatttttgtcgttaaacgagttactcttcagggcccgtcgtgtgaaaagctttgctgcacatcagcctggaggaaggctggacaggagaaatagcttcccaccaaagccctcccgtgtctagaagcatcacagtggcccttgcttaggtggcagaggacaggggtagatatttgtgatcaagaaagttggtcaggccgggtgcagtggctcatacccgtaatcccagcactttgggaggccaacgtggacgaatcacttgaggccaggagatcaagaccagcttggccaacatggtgaaaccccatctttactaaaaatacaaaaagtagctgggcatggtggcacatgcctgtaatcccagctactcgggaggctgaggctggagaattgcttgaaccgggaaggcggaggttgcagtgagctgagatcatgccactgcactccagcctggtgacagagtgagactctgtcttaaaaaaaaaaaatgttgctcagaagcttctcgatcttgtcacattctccggtggtgagttgagagcagcccaggcctggggtcctagggagcttgacgtggctactgttctagacagtgctgagtttgtcatcaccttgctttcattatgatttcctcctcctcgtcaccacctacggtgtttatggagttcgctgtacatgaagccccagcgtccagaggtgtaagacagagccccttctaggagctgctgtccatcccactgaaaggcaggtctgacacagaagagacaaacaaccatactgggcctctggggccccgtgagatgtgaacttcaggtaccagagtgcatgcgggaggaggcctgggtgccctggggacccaaagcaggagctcatttctgacctgcctctctcaccaagcttcctttgctgaatgccgtgggcaaacagtggtgttggtattggagcaggatcaaagctcattcctggctaacctgcaaaaatgagcaggtaaacaaatgggatccataaaatagagactaaaatgaaagtttgtcttactgtgattagcaactggcccctttccaaattccacctgctctgcgtggagctgtggcgtctcattccaagagccttctcacagcatctgacccgggcctggggtaacagtacactggggtttgccaaggataaccatagcaaggcagctacaggagcacagcatggtgggggggcatgaaatcagaacaagcaggacccacgggcgggggtgagagcaagtggctgggaggcagaggcagaagtgatggctgctgactcaccgtgtgtctgccaggttgcttaacccatctccgctccggttttcccatgcgtgagccctctgcagtgtgtggcatgctgatcggcctctggcatgaagagtaaaagcaaggccacataaaaatcacaggtgcccctcgcttcgtgcaacatgtgtgccagtccagtttctgcaacagccccccaggcgctgagcctgctccatgggttgggagatgttagacctcaagctgtgcccctagctgggtgggtatgggaagttacatggcagtgctggctgcattctgcttatcactgaaagaagtggctttggaatgggtgatttcttaaggtgtttccccactcagttcttctgttcatttttgtacattattatctcttcattgttgtacatttgttggagcttagccccaacagtgcctgcctaggtggtgcggactgaggaatagagatggagtaatcatgatatccaatgtcttatctcactggcctccccgccccaccacatcccttcccattggacggtgaggactgaggctccatcgctgaaatgcacacgtgttaccaggcagggttgtgagggccagttcaatgaacataaatacccttgtcagatcagttgtcatgattctagagaataaggccggaggaagtgagcatgctgatactaaagaacaggggagagaatactgggtttggttgtgcctggtcactaaaagcaaacttcacccactgagaacctgctagtcaacctcctatgatgttcagaagcctcttgaatgttgataattaatggacagggtgagcttggccaggcaggctggctcatgcctgcagtcccagcactttgggaggtcaaggtgggcagatcgcttgagctcaggagttcaagaccaggctgggccacatggcaaaatgctgtctctggaaaaaatacaaaaaaaattagccagatatggtggcatgcacctgtagtcccagctccttgggagggtgaggcagcaggattgcttaggcccaggaggtcaaggctgcagtgagacaagattgcactgctgcaccccagcatgagtgacagagcgaggtcctgtctcaaaaaaaaaaaaaaaaaaaaaaaggtgagcttttctctactgagtttcttgaagtgtggcacaactgaggcatagcatagtgggacaggatgctgttcatttatctgagaggtgaaaggatgtacctcctgctgcttttttggtgggatggggtcggaggagagcctgatgagccaggcaaggagaggaggtaacagaacactggtggagttgatggtgagaagctggactctctcagtgggctgtttgcctgcccctcccttcatttcccataggcttcggtagaagcgtggcctgcagaatcaggaaacagtgctggttaatctgtaagtatgcaacattcttgggcctttctgtcactgaagagcataatgtaattcaggccagtgcagtactgagatatggagtgtggccagcacccatggcaggtgcttggaggtttatcctagtctttctgctaacttcctggcccaagtgcaggtcacttaccttttctgggattcaggtacctgtaagaagagaagtgagtgtgttggactccctctagggaactggaaggaataagcaataagtatactttgacattttataaatagaacatgtttaatacatgcatttcaacgaggcctataggattaacaactttggaggcatgtgtaccggtttgcggtcagtgctcacaccacctggtggaatttccttcctttgactggcaggaagagggaagtacttctcacacatctgttaccttctgccaagtgtaaatgtcatgctggcatctgtgtcttaattgtattggcattcccttgtactgggcctggatggggtgggtgctcaacccacacagacagaaccaagctcccgactgcagacacacatcattaagtttctggacttcagccacagtatctttgttattagattattaactcaatagccttcttgtcttttagcctaggactctggacatagctctctgtagatgcttattgatgactgattggctaacagatgcaatcacagagtcacagatgtcaactcttgcctgtccttccttcctttccttcccttccttccctccttccttcctctctgtctttctttcttttctttctctctctctctctccttccttccttccctccctctctccctgcttccttccttccttccttcctccgttccttccttccttcctctttctctctttctttctttcttttcttttttgatggagtttcactcttgttgcccaggctggagtgcaatggtgcaatctcggctcaccgcaacctccgtctctcaggttcaagcagttctcctgcctcagcctcccgagtagctgggattacaggcctggctaattttgtatttttagtagagacagggtttctccatgttggtcaggctggtctcgaactcccgacctcaggtgatccgcccaccttggcctcccaaagtgctgggattagaggcatgagccaccgcgcccagcttgttcgcgctcgcttgcttgcttgctttttctttctttctctctctctctctctctctctctctctctctctccctccctccctccctccctctctctccctctctccccctctctccctccctccgtctgtccctctctttctctcgttctctcttttctttctttctctcaagacagggtctagctgtgttgcccaggctggaatgcaatggcgtgatcatagcttactgcagcctctgcctcctgggctcaagtgatcctcccacctcagcctctctatagctaggactacaggcatgcgccaccatgcctggctagtttttgtattttttgtagcgacagggttttgccatgtgcccaggctggcctcagattcctgggctcaagcaatctacccaccttggcctctcaaagtactggggttatagacgtgcgccaccatgcccggctcaacccttgtatttcttgatggttttcacatgcagaagcccaaaatctgggagataccgatggcccctggatccaacactagagttatttctctccacagcagtttgcctcatgctcctttggtcactgataagtgttgttaacatttttcaaatatcctgtctgcactgaggtgtgacgagcacattattacctctgattcccatgctgacacacagatcgggcatgtctttgtgtttgtctttggagagccttatttttctcatgtgatatatacaccgaaatacacaggaatcattattgtacagaacataggagacagccactatgaaagcaactgtccggctgatggaagaaaagttcaggggcttctcattttgattacctgtgattttgctttgcatacaattttatttccttggtgagagctgcttcttccttgctgacttttaagagacattggaagacatggggcgggtcttctgaacatctacctgtgcgtcactttttaatttcttttccaggtagagtctgcagtgagggaatgagttctttttttgtttatttgtttgttttttatttttttttgagatggagtttcgctattgttgctctggctggagtgcaatggcgcgatcttggctcactgcaacccacaccttctggggttcaagcgattctcctgcctcaggctcccgaatagctgggattacaggcatgcacctccacgcctggctaacttttgtattttcaggagggacgtggtttctccatgttggccaggctggtctcaaactcccgacttcaagtgatcctcccacctcggcctcccaaagtgctgggattacaggcgtgagccactgcgcctggccaggaatgagttcttaatgagagactcttgagtctttctctggaagtagaatggaatttttagaaggatgaaagacagatgttcatttcacagagcaggctgctctattcacatgcagcctcaacaccagtgacattccaaccagtgtttagggtttagttagggagagaacttcatccccattagttcatatgtgtgtatgttaaagcacttagaaccatacctggcacataagaaaaattctgtaagtattcattgttcttgttattaccatcatccttgtaattcagtgattcatggcggggtgcagtcaaggagtgtcatgacaagcgaacttcagaagactgcatcagacttacaggtcactgcttttgtagccccagtacggtaggagaaacatccactgggaggtgggtccctcgttagccctgaagagtggattgctgatgccttctgcttcaccctctgcttgtgctccttcttccaagctgttaatttctctgaaatcttgtgtttctttacgcaggggttcacatcctgattgcttgttccactcggaagggaaggcagagggcttgcatctgaagccatgcctccttcatcagtgctgtatcgagctctaggtttgggttcttggcacttcggtgcttcccttctcactcagtagtcataatgttagcacggttgatgcattgacacgctctagtgagcagtttgcaggcatctatcatgaactgttcaaagagatacgcagatacatctcacaaacactgatggaatacttagtatgtgctaggagggcactagggagagaaagatgaaaggcagcgcctgctgttgatttcatttgcatcttgccctcaggactcaggttaattggtctaggagcttatagactattaggcttcctagaccccttgggagacatgggacttgccagacccatttccccaaaaaaggtaagcactgtggaggattcttctcctagagtctagcatccatcatttcaccagtgtggctgattccaaaaaatgcattttgacaagaagagaaacacagttagttaacagacgtcagaatgtgaaataactttggctgattggaggagttaaccggttcttttgtcatcttgtggtccgttctgtgtgtgtctgcttagctttctcacgctgagccttttccctcaggatcttcagcagttttttccagtatgtagatgattcaactcacagatggcagcttctaagttattatgccactgattaaagaattgttaaggcagacttatttctctaaatacaaacacatgcaaaactgagattttgaccaaaactttgctagacacaatagtgtattgtttctctcttcaaagtgtgttccatgatagacttgtgttttataaaacagcagtgcttggcatgtatattacgaggtctatcaccaaagaattctaagctctttttaaaaagacatttttaaggtaaatgaccatttaaaaaagatactccgtctcttctatttttttcctttcttatatcttcagcaacatcctaaatgtgacaatgtacgtaaaacactactgcatagagtgaatgttcactaatgctgatgactgtctttattggtatctctaatagttggatttgtggttaaacatatatgcttcttgccccaaatgactacatctttgttttctgttcgggcaaacagagaactggagttcactgtgatctcttcactgttaacactatttaagtgttattcaaagaaaatggaaacttttggtctcagtgtcatgccaacttgttctagattattgttcttaaaaaaaaaacaaaacaaaaaaaaacagagccccaggctggatgccgtggctcacgcctgtaatcccagcactttgggaggctgagacaggcagatcacaaggtcaggagatcgagaccgtcctggctaacaaggtgaaaccccgtttctactaaaaatacaaaaaatagccaggtgtggtggcgggctcctgtagtcccagctactctagaggctgacgtaggagaatggtgtgaacccaggaggcagagtttgcagagagccgagatcgagcgactgcactccagcctgggggacagagcgagactccgtctcaaaaaaaacaaaaaaaaagagccctggccaggcacggtggctcacgcctgtaatcccagcactttgggaggccgaggcgggcagatcacaaggtcaggagatcgagaccatcctggctaacacggtgaaaccccgtctctactaaaaatacaaaaaaaaattagccaggcgtggtggctggcgcctgtagtcccaggtactcgggaggctgaggcaggagaatggtgtgaacccgggaggcggagctggcagtgagtggagatcttgccactgcattccagtctgggtgacacagtgagactccatctcaaaaaaaaaaaaaaaaaaaaaagttgagaaatacggagagacttattatgaagcaataaatagttatgacacgatgttattaacactgggagaaacaaatagaccgatggaacaaaatagatagctagaaatagacttctacgtaaggaaacttggttatgcagataaacattgtggacaagtgggagaaggaaggattattcaataaatagtgctgagacaacttaaaaatcatattttcaagaggttgcaatgaaggtcctcacatatcctatatacaaaaaattagtttgaagtagaccaaatacatcaatgtgaaaagcaaattctaaacagtttagggaagaatataggaagatattttcatgagtggtgtagagaatgactttttttttttttttttaaagacagggtctcactctgtcacccaggctggagtgtagtggcgtgatcagcgctcactgcagccgtgacctcccaggctcaaatcgtcctcccaagtgatcctcccacctcagctaggactgagactagctggggctgcaggcacacaccaccacacctggctgatttcttttgtattttatacagagatggggttttgccatgttgctcaagctggtttcgaactcctgagctcaagccgtctgcctgccttagtctcccaaagtgctaggattacaggcatgagccaccctgcccgacccaagaatgactttttaaagcataagcaaaaagcataaaccatgaattaatgattgctaaatttgactgtattaaacaaagaatatcagtttatcaaaagacaccataaagtaaaagagatccacaaacttagagaagttatttgcaatatatataactgaaaaaggatttgtatttagagtatgtaaagaactattaaataagaaaaagatactcaaaagaaaatgggcaaaggacttgaacagggattttagagaaaataggaatagttaataaacctatgaaaaggtacctaatcatcagaatttaggaaccccaaattaaagccataatgatataccatttgataccaaccagactggtgaaaatatgagtctgataatattaagtgctgacaagggatattggtcagtggaaattctcatacacagctggcaggactgtaatttggcacaacttttgaaagcaatttattcttacctctattaccacacagttctgccattccactcccaggaacagaccctggtggaaagagaataagctttggagtcagtccaggatttgaatccatcttttaccattttcttttctttctttctttctttctttttttttttgagatggagtctcattctgtcacccacgcggagtgcagtggcgcaatcttggctcactgcaacctccgcttcccgggttcaagcaattccctgcttcagcctcccgattagctgggactacaggcgcctaccaccacgcccggctaatttttgtatttttagtagggacggggtttcaccatcttggtcagcctggtcttgaactcctgaccttgtgatccacctgccttggcctcccaaagtgctgggattacagatgtgagccactgtgcctggcctgttttaccattttctaattgtgtgcccctgagcctatgactttctcagttcccttatctgtacagtgagagaatgttgtgtttagtaactgaaaattcatggcatatagtaaacctcactaaatgcagacacttttattaacatgtgactgaagggcaggccccctgtgggcctggtcttatccttatcctttttagtatatgcacttcttctccacagtgcatatgctaatactaggtattcaagaaagcaaggtttgatttggatttgcagtgtctcccctaaatgctcagctcctgctatatgcatttcattctgcacaaacctcctcgccgcctgccacatctaagctatgatacaaatattcttcacgtgtgaaattccttgctcactgcttttacctcactgtggccatcttctctactaagaaagtcagctgtggtatcaacacacaagaatgtgtgcagctggtagtgtatacattcagaataacaaaggttattacactgaaaggatgtgttttttctttattactgggcatcttaattgcttcttggatgttacaagcccagcattgcgaagtacaccgtagagcagaggactaatctgtggattgagttgaggcacaaccctgtgagtgccctttctcagtgcagcagtctcagaggtaattttactcttttctgaaatctcatttcttattttggtgtgtgcagaaaagctcaactggagttacctgcaaatgcaggcatatgtgatagctctgctcagccacgtattaagccacaagcagccaagaacagatactactggcgacagctaagtaatgcacacacacacacacacacacacacacacacacacacacacacacacacaaaaggagaaaagtgataaagaagcaagaattccaagtgagttacaaactccaaggacttggaacatattctgaggaattcttaaattgaggcttacgagtgagaatatataatgtgtctccttaaacgttttggggtgacagatatttctgggttgtgggtgatatttttagggagctttaaagaatgaattcaggagacttgcagcctgatgctggttgtctgggtattttgggacatttcttatagcccagctttttattgctcaacacagatttagaagcttgtcctaatcaccaggaagatccttaaagactggcaataaagacaggaatttcaggagccaggcacagtgcctcatgcctataatcctagcacttcgggacatgggggtggaaggatcacgtgaacccaggaggttgaggctgcagtgagccatgattgcaccactgcactctaggctgggtgacacagcaggaccccgtctgtaaagaaataataacaggcctggcgcggtggctcatgcctgtaatcccagcactttgggaagccgggccaggtggatcacaaggtcaggagatcgagaccatcctggctaacacagtgaaaccccatctctactaaaaaatacaaaaaaaattagccaggcatggtggcacacgcctgtagtcccagctactcaggaggctgaggcagaattacttgaacccagggggcagatgttgcagtgagccgagatcacaccactggactccagcctgggtgatggagcgagactccatctccaaataataataataataataataataataataataataataataataaagttttttttttaaaaattgggattttagaccaatgtgagggaagttagcagcatggccctgagaagccatgtttccagagtgcactgttaggactgctgaaacagtttaagtacagacatacaagtcagcacacaggaagcagagcccgggaggattagacctgacatttgaaccagtccgagcccctctgtctaggtatctcctccaatcctccagtcatccctggttaaatattttgatttcttttgttaatactgtataataattctaaatctttctgagccaacattaaggtgaccaaacatcctggtttgcatgggacacaggactttcagtgctaaaactgggacagttctgagcaaactgggatgcttggtcctagcggacaactgctttgtgtgtctggtacaggtgagccacagctgtgtatacatgtgtagtgggttgaatagggacccaccaaaaaaggtgtgtccacctagaatctcagaatgtgatctgatttggaataaaggtcttttttataacaatgacaacaacaaaatctaccctttcaactaattttaaagtgtacaatacaatattgttaattatatggacactgttgtacaatagatctctagaaatttttcatcttccataaccaaaatgctgctcccaccgaacggctcctctccccctcctcctcccacccaacggcccctctccccctcctcctcccaccgaacggcccctctccccctcctcctcccacccaacggcccctctccccctcctccctgctctgtggctgccaccattctactttctgctgctttgattttgactacattagctacctcatctaaatagaatcacacagtatttgtattctgggactggcttatttcacttagtataatggcctcaaggttcattcatattgtagtgacaggatttcctttttttgttttttgtttttttgagacggaggttagctctgtcgcccaggctggagtgcagtggtgtgatcttggctcactacaacctccacctcctgggttcaagtgattctcctgcttcagcctcccgagtagctggaattataggcgcctgccaccacgccaagctaatttttgtatttttagtagagatggggtttcactgtgttggccaggctgatctcgaactcctgatctagtgatccatccaccttggcctcccaaagtgctgggattacaagcgtgagccaccgcacctgcccccaccccctgccacctttttttttaaaggctgaataatattccgttgtctgtatagaccacattttctttatccactcatccatcagtggatgttcaggttgttcccactgttttgctatcgtgaacagtgatgcagcgaacatgggaatgcaaatatttctttgagattctgttttcaattctattgaataaatacccagaggtggggttgctagatcacatggtagttctgtttttaattttctgaggaaactccattctgttttgcatagcagcagcattatatattctcatcaacagtgaacaaggatttcagtttctccacatcctaatcaacacttactttctgctgttcttttttcttcttccttctttccttcccttccttcttcctttctcttccctcccttcttcccttccattccttcttcttttcccttccctttcttcttcccttccttcttcctttccctttcctttcttcttcccttccttcttcctttcccttcctttccttctttccttcccttcccttccatcttcccttcccctccttcacttcctttttcctttcccttcccttcctccttcccttcccttccctttttctttcccttccttctttgtttccctttcctttttccttccctttccctttcctttcctttctttttgtgtttctataatcatggccatcctaacaggcatggggtgatacttcattgtggttttgatttgcatttctctgacatttgtgatattgagcatcttttcatatacctgcttgtcatttgtatgttttccttacagaaaggtctatttaggtcctttcctttatgtattttaaaaattggtttatttgcttttgctattgagttgtaggaattccttgtatattttagatatcaatctcttttcagatagatggtttgcatgtattttctcccactgcacaggttaccttttcactctgttgatgctttcctttgctattcagaaggtttttcgtttgatataatctcacttgtctatttttgcttttgttggcatatccaagaaatcattgccaagaccaatgttttgaaactttccccctatgttttcttctaggaggtttgtagtttcaggtctacatttaagtcctttaatccattttgagttgaggtttatgtatgcgtaagataaggatccaatgcttcttttgcatgtgggtatctagttttcctagcaccactttgtgagacaatcctttccccactgtgttgtcttggcacccttgctgaagatcatttctctgtgtatatgtgggtttacttctgatctctctattctgctccactggtctgtgtgtctgtctttatgccaatgtcatactgttttgattacagtagctttgtaagatgtttcgagatcagaaagtgtgaaaattctagctttgttcttttttcttcagattgttttggctattcagggtcctttgtggttggttccatgtgaattttaggactgtttttttctattcttcaaaaaatgccattgggaatttgctaggaatttcattaaatctatgactcacttcaggtactatggacattttaacaatattaagtcttgtaatccatgtacataggatgttgaattttcatatatggactttattatgttgactttttatatatggactttattaagtcttgtaatccatgtacataggatgttgacttttcatatatggactttattatgttgaggcaatttcctttttttcctggtttcttgcagttcttataatgaaaggatgttgaattcagtcaaatgctttttttttttttttacatattttgagatgatcatattatttttatctttcagtcttttaatgtgatgtaccacattgattgacttttgtatattgaaccatctttgcatctctgggataaatcccacttgaccataatatattatctttttaatgtccttttgattcagttttgtattttgttgaaaatttgtgtatctgtattcatcagggatattgggctgtatgtagttttcttttcttgtagtgtctttgactttgttatcactataatgctagcctcaaaaaacaagtttggaagtgttcccttctcttcattttttaaggagagtttgagaaggattggcattaattctttaaatatttggtagagttctccagtgaaaccaccttgtcttagacttttctttttgggagatttttggttactgattcaatcccatttctagtaaaagatctgttcagattttctgtttcatcatgattcagtcttggtagtttgtatatctctaggaatttatccatttcttctaggttatctaatttgttggtatataattgttcactgtggtcttttattaatactttttattctgtggcatcagttgtaatgccccctcttttatttctgattttatttatttggaccttttctccttttttcttagttagtctgcctaagagtttgtcaatttttgccaggtacagtggtgtgtgcctgtagttccagctatttgggatgctgaagcagaaggatcacttgagctcagaagttcaagaccagcctaggcaacatagcaagacccgcccccttcatctctttaaaaaacaaacaaacaaaaaacagatcattaattttgtttttcttttaaaaaaatcaagtcttggtttggttgtttcttttttctattgtttttatattttctatttcatttctttcaattataatctttattataatttccttccatctgctaactttggcttagtttgtttttttctttttctagtttcttcagttataaagttgggttgtttatttgagatctttattcttttttaacataggtgtttactactataaacttctctcctagtattgtttttgctacagctcacaggttttggtgtgttgtattttcatttttgtttgtctcaaggtattttctaaattccccagtgattgttttctttgactcagtggttaagagtgaattgtttcgttttcacatatttgtgaattttccaggttttcttctgctattgattttcagtttcattccattgtggttgaaaaaaatgtggtatgattttaaacttcttaaatctgttaagtcttgttttgtgccttaacatgtgacgtatcctggagaatgttctgtgtgtacttgaaacgaatgtgtattctgctgcttttgggtgaaatgttttataaatgtctgttgggtccctcgatctgtagtgttcttcaagtcctctgttttttttttattagccttttgtttggctgacatactgtactctatacattattgaaagtgggatattgagccaggcacagtggctaacacctgtaatcccagcactttgggaggccgaggtgggcggatcacttgaggtcaggagtttgagaccagcatgggcaacatggtgaaaccctgtctctacttaaaaaaaatacaaaaattagctggatgttgtggcacatgccagtcatctcagctacttgggaggctgaggccagagaatcgcttgaacccaggcagcagagtttgcagtgagccgagatagtgccatggcactcctgcctggggaacagagcgagacttatctcaaaaaaaaaaaaaaaaaaaaaaaaaccccaaaaaacaaaagtgggatattgaaatctcctactattgttgtgttgcttcctatttctcttttcaattctgtccatgttttatatctttgggtctctgatgttggctacatgcatatttataattgttgtatcttcctggtaaattcactcttttatcattaaataatgttgtttctggtttcttgtggcagtttttgtcttaaagtctattttgtgtgatataagtatggtcatccctgctgtcttttggttaccatttacgtagactacctctctttaccctttcattttcagcctatgtgtgtttttaaatccaaaatgagtcccttgtagacagcatatagctgaagcttgtttttaaaatccatttagctactgtatgtcttctgattgagggatttaattcacttacatgaaaagtcattactgataggcaaggacttactattgccattttgctcattgtttttatctaccttgtagctcttttgtccctctcactgtcttcctttttgtttccctcatttttcttctagcaatgttctttgattactttttcattttctgttgtgtatcgcctatagatattttctttgtggttaacatggggattacataaaacattttatagttatattaatctgttctaagctgacaacaacttcagtcacatacaaaatctatatgcttttctgcacactttgttattgatgtcacaaattcatgtttttatgttgtgtatccattaacatattttacataattattttttatacttttgtctttttttaattatactttaagttctgggatacatgtgcagaacctgcaggtttgtttcataggtatacacatgccatggtggtttgctgcacccatcgatccatcatctacattaggtatttatcctaatgctatccctcccctagccccccaccccacaacaggccccggtgtgtgatgttcccctccctgtgtccatatatcctcattattcaactcccacttatgagtgagaacatgcggtgtttggttttctgttcttgtgttagtttgctgagaatgatggtttccagcttcatccatgtccctgcaaaggacatgacatgaatgcacctttttttatggctgcatagtattccatggtgtatatgtgccacattttctttatccagtctatcattgttgggcatttgggttggttccaagtctttgctattgtgaacagtgccgcaataaacatatgtgtgcatgtgtctttatagtagaatgatttataatcctttgggtatatacccagtaaggggattgctgggtcagatgatatttctggttctagatccttgaggaatctttatagtagaatgatttatgatcctttgggtatatacccagtaaggggattgctgggtcagatgatatttctggttctagatccttgaggaattgccacactgtcttccaaaatggttgaactaatttacactcccaccaacagtgtaaaagcattcctatttcttcacatcctctccagcatctattgtttcctgactttttaatgatcgccattctaactggcgtgagatggtatctcattgtagttttggtttgcatttctctaatgacctgaccagtgatgatgagctttttttcatatgtttgttggccacataaatgtcttcttttgagaagtgtctgtttatatcctttgcccactttttgatggagttgtttttttcttcttgtaaatttgtttaaattcattgtagattctggatattagtcctttgtcagatagatacagtgcaaaaattgtctcccattctgtaggttgccttttcactctgatgatagtttcttttgctgtgcagaagctctttagtttaattcgatcccatttgtcaattttggcttttgatgccattgctttggtgttttagtcatgaagtccttgcccatgcctaggtcctgaatggtattgcctaggttttcttctagggattttatggttttaggtcttacgtttaagtctttaatccatcttgagataatttttgtataagatgtaaggaaggggtccagtttcaattttctgcatctggctagccagttttcccaacaccatttattaaatagggaatcctttccccattgcttgtttttgtcaggtttctcaaaagatcagatggttgtatacttttgtcttttaatctgtataccagaattaaaagtgatttaaacactactgttacagtattatagtattctgtatttgtctatatgtttacctttggtagtgaactttatacttttatatgctttcattttcctatctagcatcctttcatttcatcttgaaagactccctttagtaattcttgtaaagtcagtctagtagcaaggaactcctctgcttttggttatttgggaaagtctttattcttggaaagtatccttcgttgacaggtttttattctttcagcactttgaatgtattgtctcacttgcttcttgcatgcaaggtttatgctgtgaagtccactgatagccttttaggggttctattgtatgggaaaatttgcttctcttttgttgctttaaaaattctccctgggccaagcacggtggctcatgcctgtaatcccagcactctgggaggctgaggtgggtggatcacctgaggtcaggagttcaaggccagcctggccaacatgggaaaacctcgactctattaaaaaattagccaggtgtggtagcaggtgtctgtaatcccaactactcaggaggctgaggcaggagaatcacttgaactcgagaggcagaggttgcagtgagttgagattgcacccctgcactccagcctgggcaacagagacttccatcttaaaaaaaaaaaattctccctgaaaagctagaactttgaatacatgctccaactcttttcctccccagggagaagtaaggagttaggggttttctcctgtttattttgtgctgagctagagggcatggactatgacaaataagtacatgctgatctaaaccatttcctttattctcagcatcccttgacctggcgccctttcctattctaaaccatcccttgggcagtccccttgaaaagcctggacattggactatgatccagtctactcttccccgctcccgggagaagcgaggagctggcagtttcctcttgcttacactgtgctgacctgggggagggactatggtgaatggatgccatgaatttccctgccagctttgatcatctggttttgcagcagcctgagatgcaggagcctcttaactggtttccgtatttctcacaaagggaagtagtctatgtatttttgttgaattgctgtctctgtagggacaaagagggtcttgcagttcctattttgccatgttgccgaagtcacttcctggaatgaaggtctttacagatgtaattaaggtaaggatcttgagatgagatcttcttagattagggtggaacctgatttcaatgataagtgtcatgagagacagaaatggaggagacacaaacacagaggagaaggccatgcaaaggtagaggcagagactggaatactatgtttataggccaaggaatgccaaagattgttggccaccagcagacactaggagagaggtgtggaatggatcctctcttaggctctccagaaggaactcactttgctgacacctttgattttggacttttggcctctagaagtatgagagaatgaatttctgttactctaagccagcaggcttgtggtaatttgttacagcagccccagggacatgggaagtgagtttgggagttttactacaaaaatctaggaggaggattttagacctttattggtcaatagccttatctatgtcttcactctctgtgagcccacctgtatctacggctgttatccacataggtgttttgactagggatttctgttcagtgaggtccaaactgccttcctcagtgccctggggcttcctgaaggtgctcttggtgccccctgcaggtgccctgtgggctgctttgtggggagtgtgcgaggtgaaggctgagcctgtgtggctccagacccctggcctcattaaccaaaacaagttttagataagttatttttagggggattaatataggattttgtttgaaaacaaacaaacaaaaaccacttaaaaaaaaagtaaaagaaacgtcctaaaagctacaggttgcattcttgccttctttctcttctaacgtgattctttgtgcagccattttctgccaatgctcttcttgggtgcagcagtgtctgcagtcatggtgactgggaagtgggaagggggcttggagtagaactgcagggaggatgggggttggaagaacccctggtgcatcaggtaaaaccacaaggaggtatgctgccctcattcttatccctgaatatctattgtagcttcttgtcccctttcatggtcaacatcttgcaaataatttcgtcataggctggtatctcaatttcactgacggctcatggcaaagcatggagggaaaaaattaggaaggggtggggtgaagttattaaatactgggagtgagtaaaagtgggcaggcaggaaaattattctaaaagggttaggggaaagggaggtggcataataacaaaaggaagaactgtacctgcattagagtgctataattttccccaagtattgccatagaaatcgcacttcagactctacaccatgcatcaatttgaggagaacaatttacctgtattgtttcccatgtgtcatcagcgtcctctttctcctgtttcagtcagcaggactcatttcatccattttcatctggtactgttgactattcatttctttgcactgattttgctgccaaagtccccttttcaagtcatggacattattaagtataccctttattttacatcacttgccattttcagaactcctttatttcattactttgcattcagaatttccggcctaaatcgatagccttgacataaaggcaggtctctgctttctcttttgggcatgaacagttcctttcctgaatcagaaatttatttttctttctagaagtctagtgtggggaatagtcagcatgcttactaagtcttaatttgttagaaggaaagatgaagataaatattggtgatgggggttccctagaaaataaattctacctactcctaccctcacacgtttacactctgcttttgatgcatctcttgtattctgcttttcctctctaaagaagggaaacttcttcctgggaccagtacattgggctcattagttccagccccagctctgccacacgcttgctgtttagcttttagaaagttagctcatctttctgttttctggcctatgaaatggagactcactgatctcttggatggatgaagtaccaagtaaccactatgggacttgcccccatgcaggagtaatgaatgaatcaatttcaaaacagctggacactaagcccacagcccaggctctcctcagattcattctatttacagcccagctttcacacaacgtgtctgatagccagttccttacgaagcctctgtcatgcttacggagcacgtgaccctcttgaaggagatggggaaggatcatggaatgttaaccactgttcccatgcatggaactgtgctaagaaatgtgctcccaggtagttttggagccatatgtgtctgaaaagaactcataattagctgaagtcaagggaaggggtcttcttatcactccttctgtattgttttaggcactcacactcatcagcagacagagtgcattcactttcttttctttccttttttctttctttttttttttttttttagagaggaggtcttgctttgtcaccccaggctggagtgcagtggtgcaattatagctcactaatgccttaaattcctgggctcaagcaatcctccagcttcagtttgctgagtagctgggactacagacatgcactatcacacggggctaattttgtaaattttttgtagagatgcggttttgccatcttgcccaagctggtcttcaactcctgggctcaagtgatcctcccacctcagcctcccaaaatactgggattacaggcatgagtcaccgtgcccagactacatttactttcttgattgcactttgaggtttaggggctaatgcctgatgctttttttttatctgtatgaagcagcggccacacagatcttcatcaaaagctgactgttctcatttctccccaagtaatcactcttttttttttttagcttgtgctaaatcattttttaaaattgtagctctgaggcattttattatacaaagttagtactcatatacataaactaataggaacttaaaactcattatacctttgcttcattttttttagcttgactccctcgtaaatctttagcttcattgatttggctgctatgtaagcttcattgatttggctgcttaaatcactccgttgagtgatttaagagcataatttagaagaatggtgtgtccatgtgtggctcagtttacagtaccatttggagtttgattgcttctgtgagttgggtgatctctcctcttgaggtccagatcaaccccaggaggagcctagctgctgctccccattgggcgccccatttcagcagaagtagccaggagtcgtcacccagaaccccctaacagcagttagtgtggcatctccacagtggggaatgttgtaggagttattaagaaattattttggccgggtgcggtggctcacgcctgtaatcccagcactttgggaggccgagacgggtggatcatgaggtcaggagattgagaccatcctggctaacacggtgaaacccgtctctactaaaaatacaaaaaatacaaaaaaaaaaaaaaaattagcagggcatagtggcgggcgcctatactcccagttgctcgggaggctgaggcaggagaatggcgtgaacctgggagacagagcttgcagtaagccgagatcgcaccactgcactccagcctgggcaacagagcgagactctgtctcaaaaaaaaaaagaaaagaaattattttaggcagataaagaggaaaaggggtccttgggaagttttcgttttttttttttttttttttttatactttaagttttagggtacatgtgcacgttgtgcaggttagttacatatgtatacatgtgccatgctggtgcgctgcacccattaactcgtcatctagcattaggtatatctcccaatgctatccctcccccctccccctaccccacaacagtccccagagtgtgatattccccttcctgtgtccatgtgatctcattgttcagttcccacctatgagtgagaatatgcggtgtttggttttttgttcttgcgatagtttactgagaatgatgatttccaatttcatccatgtccctacaaaggacatgaactcatcattttttatggctgcatagtattccatggtgtatatgtgccacattttcttaatccagtctatcattgttggacatttgggttggttccaagtctttgctattgtgaataatgccgcaataaacatacgtgtgcatgtgtctttatagcagcatgatttatagtcctttgggtatatacccagtaatgggatggctgggtcaaatggtatttccagttctagatccctgaggaatcgccacactgacttccacaatggttgaactagtttacagtcccaccaacagtgtaaaagtgttcctatttctccacatcttctccagcatctgttgtttcctgactttttaatgattgccattctaactggtgtgagatggtatctcattgtggttttgatttgcatttctctgatggccagtgatgatgagcattttttcatgtgttttttggctgcataaatgtcttcttttgagaagtgtctgttcatgtccttcgcccactttttgatggggttgtttgtttttttcttgtaaatttgtttgagttcattgtagattctggatattagccctttgtcagatgagtaggttgcgaaaattttctcccattttgtaggttgcctgttcactctggtggtagtttcttttgctgtgcagaagctctttagtttaattagatcccatttgtcaattttgtcttttgttgccattgcttttggtgttttagacatgaagtccttgcccatgcctatgtcctgaatggtaatgcctaggttttcttccagggtttttatggttttaggtctaacgtttaagtctttaatccatcttgaattgattttttataaggtgtaaggaagggatccagtttcagctttctacatatggctagccagttttcccagcaccatttattaaatagggaatcctttccccattgcttgtttttctcaggtttgtcaaagatcagatagttgtagatatgcggtgttatttctgagggctctgttctgttccattgatctatatctctgttttggtaccagtaccatgctgttttggttactgtagccttgtagtattaggaatccaacttacaagggatgtgaaggacctcttcaaggagaactacaaaccactgctcaatgaaataaaagaggatacaaacaaatggaagaacattccatgctcatgggtaggaagaatcaatatcgtgaaaatggccatactgcccaaggtaatttacagattcaatgccatccccatgaagctaccaatgactttcttcacagaattggaaaaaactactttaaagttcatatggaaccaaaaaagagcccgcattgccaagtcaatcctaagccaaaagaacaaagctggaggcatcacactacctgacttcaaagttttcgttttttaaagcatctccggaaaagtttctcgtaaagcccagtctcttagagccaggtggcaacctttgatatgcaaatggaagccgttagaaactgggtccacccaaacatggcgattcccacactttcttggcctttccccacctgttcctagcaacatggccgcccccacgtatccccaagtgtgtagaacatcatgtgtcctgcatttgcatattagaaggctagggtgggagggccagctttttccagggctacatcaatgacatgcccaatcaaaccaatcccctaagccctatgcaaatcagacatcgcctcctccagcctctgtatacctagctggtatctggggcaggtgggtttccctgtctccgctttggagcccccgctccctctgtctctatacaggggagcttcttccttctcccttcttgccccttcttgcctattaaactctccgctcctttaaaaaaaaagaaaaagagcataatttgtctgtgagcagcaattattttcccttattggcagtcgggcatacatggagtattaatgctgcttcccattttgtcattttgggttcaaacccacctctgtagtagccaccaccgaaggcagattttggtagactttgaaaaacttgttctgcttgaggctccatgtgcttcatggcttgcaacacctaatggcctgcaaattctacagctacaatggtgagtccagctgctaccacctactagccatggctccagcctggctccccctgccaccacctggagcatggaccatcccagcccagaggtcactgtcaaaaacaacacgcctttaccggagagcaacacagccactgacagcaagctcaatccgcacaagtccaccgacagcaagcccaatctgcccaagcccacccaccgcgagcccaatctgcctaagcccacccaccgcgagcccaatccgcgcaagcccaaccacctcaagcccaatccgcccaagccccgactcatcagttcttcacaccccatatgctttctttttagagtgttgccccctaaaccattcatgatgagtacctttcaccatctgtttttttctttttaccctcttggaaaagaggaaggtcacctgaaggtcaccactggaaaaccttgctggctctggggagttattggtctgtgacactgttcagacttgggctgtaggcagtctggtacctgtgcagcctctcttttatttgtttacttttattgtaaaacctgtgtgcaaaaaagtatatgtagtgtaaagataaggtttaaagaatagtggtgaaaaagaacatccatttaccctccaccaagcttgagaatttttttttttttttgaggcggactctcactctgtcgcccaggctagagtgcactggcacaatcttggttcactgcaacttccgactgctgggttcaagcgattctcctgcctcagcctccggagtagctgggactacaggtgcccaccaccatgcctgggcaatttttgtattattagtagagactgggtttcaccatattggccaggcttgtctcgaactcctgaccttgtgatctgcctgccttggcctcccacagtgctgggattacaggcgtgagccgctgcgcaccgcagcttgagaatatgagcagcacttttgaagtccctacgcaatgcggcttccctcatccctcctttccctctctagcccatcagaggcaaccactgtgctgaatttagtatcaatcaaccccttgatattaatgtagttttttaaccacatattaaatatttaaataatgtattgcttagtcgtgcttccttttgaactttttatcaatggtatatagtatgtatttttctcaacatactgattttctaaatgttacttttaaaaaggtgtatctgtgttgatttagctacagtaattttaaaattaggattcatattccttataattttatctctggggaatttttgaggatcttcttccagaaaggactggggttttatttctccagatacctggagtattattaccagcccaaggcctcctacaaatacattttgggtttttttgaaaacgcaggtggtgtaaattctgactccagccctaaactcaggcaggcatttcttcatttcatttattgcacccagaacaaagtctgagaggggcctgtatcctcagttcatttctgtggggcaggtttttgtttgagtaaacccactgagtgtgttgacctttggggaatcctagtttttgtagagttctctcatttagattcctatacttctaaaaatgtaaagcaaataccaataaaatagcataccagatattggttatcttttgccctaatgtggtgtaacaagtcaccacaaaacttagtgatttaaaataataatttggccgggcgcagtggctcatgcctgtaatcccagcactttgggaggctgaggcgggcggatcacctgaggttgggagttcaagaccagcctgaccaatatggagaaaaccccgtctctaataaaaatacaaaattagccgggcgtggtggcgcatgcctgtaatcccagctgctcaggaggctgaggcacaagaatcacttgaacctgggaggtggaggttgcggtgagcagagatcgtgccactgcactccagcctgggcaacaagagcgcaactctgtctcaaaaaacaaacaaacaagcgaacaaaaacaataatttatttttgctcttgtgtctgggagtcagttagggtctgctggtccaggctgtgctcagctcagcttggtgccccgctgtgggctgggttcagcctgctccacacgtctctcatcctcctcagatccatagagcatgttctcctcatggcagtggcagaatttattccaagagtgcctagcagaaacatgcatgagcagaaacatgcaatgcctcctaaggtctagacctgatgcacttcctttctgcccatgctccgttagctagagccactcatgtggtcctcagtccaataggaaacatattctgcctctagtggaaggagcggcaaagtcacatggcagaaggtctagatacaggtagagaatcttgatcattaattcaatttgccacagggaaattgctttcctttacctctgcttgctagtgctgtggatctgtgctcactgaattccattctcaaacgtttacatttcctgagggtttgatttattactcaagtatgttcatctctactcctgaagtctctcaggtgggatattccagatgagatatttcctaaaattgaaaaaaaaaaaaaaaaaggccaagtgtggtagtggctcatgcctgtaatcccagtactctgggaggccgaggagggaggatcacttgagcccaggagtttgagaccagcctggtgccccactgtgggttgggttcagtctgctccacgtgcaagcaacaaagcaagactccatcactaccaaaaaatttttaaaaatgaaaaataaaaattagccaggtgtggtggtgcgtagttgtaatcccagctacttgggaggctgaggtgggaggattccttgagtccaggatttcaaggctgcagtgagctatatggcaccactgcactccagcctggatgacagagcaagaccctctctctaaaaaaaaaaaaaaaaaggaaaagaaaaaagaaaagaaaaagaacatcaggagaatgccaactcaagaggttcactgcttcccccagctttgctactttggcagggtagggctcctgagaacaggagttcctgtgggagaatcgtttcttacaacttactcatcatacgtcaggatgtcacctggtctctgggggtacctgtggataacctgtggccgggatgggtaggacaaggtaaaacaaaactcaaactcaggtgggtgtggtggctcatgcctgtaatctcagcactttgggaggccagatccacttttgggtggatcacctgagttcaggggtttgagaccagcctggccaacatgtcaaaaccccatctccactaaaaatacaaaaattagccaggtgtgattgtgcacacctgtaatcccagctacccagttgggcgaggcacgagaattgcttgaacctgggaggcggaggttgtagtgagccaagatggcaccactgcactctagcctgggcgacagagtgagaccctgtctaaaaataaaaacaataaaacgtgtcaaactcacacattttaaatattgattcttaagccactgaagaactatatcctcattgtgctgaaaaacaatgggatacaaacttgttctattttcaagacatctagatcttttgttatatttacaagaaagataaattaggtggtggctattcataaattaatgaaagattcctcactttataaaaggagttggtgcaaggtaaatttaagtagcaaacttttccaaaacattaaaaatttcatgcaatttgaaaattttggctgggtgcggtggctcacgcctgtaatcccaacactttgggaggccgagataagcagatcacttgaggtcaggagtctgagaccagcttggccaacatggtgaaaccccatctctactaaaaatacaaaaaattagccagctatggtggcatgtgcctgtaatcccagctgctcgagaagcagagacaggagaatcgcttgaacccaggaggtggaggttgcagtgagccgagatcttgccactgcactccagcctgggcaacacagcaagactctgtctcaaaaaaaacaaaattttttaaaaaattttcttacaacttttcagaaacctgtttatcacatataacaggaaatatttgcaggtctggggctatttttccattgtggtgatcagtatatatttttaatgatttcatttcatttttattaaacttttttttaaggattcatatatggttcatttcgtgtactggttaatgtttgttactttaagccattaaaaagcagaatttgagtcttacaattggacactgtttgcatattgttttagttatttctagttttttgtaaagtatataaatgcgtttttttcttccaaattattggtcggattgtgtaattattaagagcctttgatctgagggtccctgtgtgtctcatctctctctctctttttttttttttttttttcctgtggcggagtttcgctcttgttgcccagactggagtgcaatggcacgatctcggctcaccgcaaccgccacctcctgggttcaagtgatgctcccgcctcagccttccaattagctgggattacaggcatgcgtcaccacgcccggctaattttgtatttttattagagacgggatttctccatattgatcaggctggtctcaaactcccgatctcaggtgatccgcctgccctgacctcccaaagtgctgggattacaggcgtgaggcaccgcgcccggcctgatctctttactgacacgtgcccacaggggagcaaggaattcctaacttcagtagtaacttgggaatttcattgaaaagtgacaactcctttccatctttcatacttatttttcccaccatcttctgggttttgataattatcttttaggtactccaagagtactatgataggcttaaaaaaaaaaagaacagaaaaggagacagctgggaaatccaccagcagaatcaagttccatataccaaattattttttttcatattttcttacatattgtttgtaccatctcttcatcccactctactttcggagcgagcattattcctggaagaacttttgtattttctcggagtccatctgctctgaatacttatctcccacctgaggccatcatgttccattcggagcatcgtaatcattttcacagcaactaaacatgatttcacacacagcagattatgacttctgtggggagtgagcagtgtaaaatgattaaccccttaggacagggaccccatttcacactaatctccttagcaaccaacagaagacaggaaaatggacagcataaatggattgaggataatgcagcatcccatttaacgatcagttctaaatgcctccggaacatacttccaaccagaaatgatagctgatgccaaagagtattgagcaaatgtccctggaaaaggtggcactcgtgtggaagaaggacatgggaacatatgccgtaaagattgggggtccatcagggatgaagtcttgcctgactgtggtgggccgctgggccagtaggactcccggagagacagcatcacagaatgcatggatggtggggttccgaatggcttaagtctaaatgagttgattctacttttgtctagttccgttacgttttggggaagaagagctataccatgcataggtttgtgaattagttcttataacctccctataattacagaaacaaggataacccaaaggtcttgatttttttttcctaaaatatttctttttccctaaaagacttcatggcaattgaataccctgttttcagtttactattgctagttcaaggaagggagtttttactgggaagaagaaagtcaatctaaacaatgccacaactgtttgtttttttttaaataaccttccatgcctatgacacaggcagctaacataatgggttccattgtatttgaatgcttctgaagttaatgctacctttttctgcatgacttacatatagaggaagtcgggttggtttgtagccaatggctgttagatttgatgactaacagtaggtatctcagtaacaaaatgtttctctctccatcaccattaattttggaatcttcaccagagctgattgatcaactcagacaacactctttataaagtataatgaaattagaattttgatttagtcgtaaatgtggttacagggtgggatttgaaagcatcttctgtcattgaagagaagactatcatcaaagaaattaccggcatgctataggaatccaggcattgtggaaccttctgttaccccaggcaattattattattgtgattttcgactcggcaagtgtatggacttgaaaaaatcatctaataaacatttattattagctaccctttgcctgatagcagaaaatgagaaggaaccagatgcacccactttaattaattggtgtaatcaggagtggtatgcgacatcaagggtgaaaattgctgacttaaactgtggctttgtggctccaatgaagtcttgaagtcttttttccccttgaataacaacagaatcagagcctctggattttcctttctcatccatctgaatttctttccttttttgggggtggaggtgtgttcaattgaaacttttgatgtggtgataggattcccaatttttctgcaggagagttgggagtttattcctgagttttctcagttcattcaaaagaccaacaaagagaggaacaacatcaggaaatgtaatggaaacaatacatgttatcctccttttgcctgaacatggtacagattgaagtagcaaccctctgcttagaaaaaccttttctgttgttcccgactaagcaaaccatcctttaggtctctgcttagacatcactttctctgagaagtcttcccaaaataccctccctcccaaaccaccctaccctccatccttcctccagctctgttaggcttccttattcccgtcttagcacttcatccactttattttagaattgcctatttattgtctatatcctcttttacttggggtcaggcactgtgtcttgtcacctctatatctccaggatctaatacagagcctagcattcagtaggtgcttaatcaaacctttattgaatgaatgaatgaatgaatgaatgaatgaatggaagtagtgtctgtctcacctaggtataccttactcatgtctgcattttcagtacctactgtcactggaaaggagttccgatccagactccatgagagggttcttggatcttatgcaagaaagaattctagatgagtccataaagtgtaagcaagtttattagagaagtaaagaaacaaaagtatggctactgcacagacagatcagaaccgagggttgctggttgcccacttttatggttattttttcatgatatgctaaacaaggggtggattattcatgcctcccctttttagaccatgtagggtaacttcctgatgttgccatggcatttgtaaactgtcatggtgctggtgggagtgtagcagtgaggacgaccagaggtcactctcgtggccatcttggttttggtaggatttggccggcttctttactgcaacctgttttatcggcagggtgtttatgacctgtatcttgtgccaacctcctgtctcatcctgtgattaagaatgcagcccagcaggtcacagcctcattttacccagctcctattcaagatggagttgctctggttcaaatgcctctaaccctacttggtgtatcagttatctattgctgcataacaaaccactgcaaaacttagtgtcttaaaacagcagctatttagccatgattctgcagactagcagtttaggctggcccagctggtcagtgctggtttcagctgggctccctcatgtgtctgtggtcagcttccaggccgttgagtgctgggtgttctaagtaggcctcagctgggggtgttgtctcttttccctgtgatcttttatcttccagaaggctagcctgggctttttcaagtggcaactgggcagggctgtaagaaagggagcagaagtatgcatgacctcttgaggcccaggctcaactggcacatcatcacttctgctgtattttcttggctgcagaagtcacagagccagtcctgacttaaagggaaggaaaactgacttctttgagaggaggaactgcaaagataggttttaaagaggcagggatacgtggaggagagtaattgaggacatttttgcaaacaatctattattcttggcatagtgtaggtactctaaagcacttgactactttgagtccaacaagtattagatttagcccaagtcttggaaagtcttccaaagaagataaaatttctctttggttgcattctgaatccctgcccttccccatctcctattccctgatccctccactgctttgtgacccaagcatgcaggccttgtgtggctgtcagcgcccaggtcctcctattcaatgggtgatacatcctggacacctactgttctcctgagcatcttgtataaactagaccccacacccgacgggaccacagcagtgagcaagaaagacagattcctgttctccactgggaaagatggatgtttgactagaaactacgaaatggatgtttgactagaaacaggtaacagaggggacctgccttgttgaggacctggcatttaagctgcgacctaagaggtgggtaggaaggggtgttctcgccatggaggaggtggcggtgacagtgtggggcccagagacggtacggtggagcacttttcagagagagggagtgtgcagaagggccctggtgcaggaaactgggagaggacagaatggcttcagctcaggggtgagggatggcagaggtgtgccagaccgggtctcctggggctgggtgagccaaggcactttcccaagagatgactggaaagctgttgaagggttacagacacaggggaggtgacccaatttactttttaaaatcatcctgggctgcatagataatacatgtagaggcgtgcaaggctggacatgaaattccttccattctccaccatcaaaacactctacccagcggggtgtgaggaagaaagcaatccgatgacatcgaattcgcactaaagttactgagaaccttgtcatggtatttgttcaaatcttgagtgtgcagtcttcgaaaccctctgagctctgttccagactgtcctctcagccttgagtgcacatggggcaccggaagctggtgcactggggaagagagggaaccgtcactgccagctgcccggtggtgcaacccccattcattctgatgtgggctggctggctggcaaggcggcagaggggctcagtgtcgccgtgtaagtcctcaaacggtccttgctagtggctcactttagaggggatggtgcacggctccttttcctcgggatctcagagcaggtgcttcacctgcctctacttcccccttgcccatattccccccattgggtactattttaccttttcattggatgtcatttaaaaaatgtggtaactcagcaacacctttcactgccttaggcatctggttttctgtgtgacacagaggccttccttctggcgctgtctcccgggagcatcttcaggcagcatttctctaacttcactgaatgattctggaagtggctggcagatcactgtcagtggagtcaaccagatgtgtatctgctaggccatttccctttccaccttccctcggttctcgctgggtcacagaagcaatgtcataacaacacagcttcctcctaatgaaacatctgcagccaccctctggctgacagttcattaaccttgtggcccaaactgcttcggtgccgtccctgctcctgaattttaacattcagagttttcttcaaagcccaggtctgcttatcaatcatgttcaatattaggttacttacagaatgaagtcattatctttaatgtttaataactgtgccacaaagataatataataaaatctgagaaatgtaattgagagaggcttttgactcaagtcttgtgtgtgtgtatgtgtgtgtgtgtttaatctttcctaatcctatccccaaggctaagaaaaaccttgttttcgctctgtcttctacttggtttgtctcttttgttttgtttttgcttggcaatgtcctgatcagtctgttttggtgatggctgagtctggggagctggcagcagagatgatgacactgggattgacactatgctgcaggagggggtggttgacggccacaggagatgttgtggggttggacccttgcagggcatggatttggtcaggtatggggaacaaatgaccagcgtggactctgctcctgacacaaatgaacaaagtgcccagatctgattcccccagccctggtggcttccaggtctttgaaggtagaattgagcctcacagcagatggctcctggtagtgaagagattcttgggcaaaagcctggtcattaaagaaggaagatttctttctttccttttttttttttttttggagatggagtttcactcttgttgcctaggctggagtgcaatggcgcaatctccactcaccgcaacttccacctcccgggttcaagcaattctcctgccttagcctcctgagtagctgggattacaggcttgtgccaccatgcccggctaattttgtatttttagtagacatggggtttctccattttggtcaagctggtcttgaacttccaacctcaggtgatctgcccgcctcggcctcccaaagtgctgggattacaggcgtgagctactgcacccagccgatttctttttatttttttgtttaggaaaatgtataaaatggaatgtagtcattttgctttgtcttcttggaagaagcatcaatatgaataagtctttgaatttgcaagttaaaactctgattttccatgggcagaatccgggtgagaaataagtctgtttgactgttttgagttcttcctttaaagaatatagaccatgatggtggcctgtgttgtgtcctgaggggctgtgtacacggagtctatggcaaggttcataaaacgcttagaggtttttcagagaaaggagctatagaaatggaaggtggcacagttgtgttggaaacctcccacggggtctccaggctctcatttccctccaagtcataaagtgagaggatctgtggtaagtctccccctctcccctcccctccctctcttattctgttctcaaggcaagaagcaaagcatgagggtctaactatacaggacaatccttccacggttcctctgcgcagtcccatcttacatctttggaggagttggatagcttttctttcaaaattttacaataattcctttcctttttctgaattgctttatgagttgacttgtcttcctaaggagtcaaagttaacaagactacccttgaacaatgtgaaactcaaccaggtatgtagcaggcttttggttttttatctaaatggttgaatttcttttttggtctagctgtattaggaatagagagaagagaatttctggaagtggagaccaggaaagggttcagactagttcttattattattacttttttttccctgagacagagtcccgctctgttacccaggcttctggagtgcaggggcatgatctcggctcactgcaacctccacctcccgggttcaagcaattctcctgtctcagcttcccgagtagctgggattacaggcacccaccaacagacctggctaatttttgtatttttagtagagatggggtttcacgatgttggccaggctggtctcgaactcctgatctcaagtgatccacctgcctcggcctcccaaagtgctgggattacaggcgtgagccactgtgcccggctgggttcttgagggagccaggctgagttctgcagatgcttctgtttttgactgctctcatattttctaaagtacatcctagtctctttcaactcatggggaaaattgcagagagttagggcccgtatagtatgtgacaccaatcaagacataaataatgaagcataaacatgtttttaaaaaacctgttatttgggatggagagaaaataacccttttcaaacattcgatataactttatacatcctagggaaatgtttacacacaccattggtttaaaattttagctgaattattttgatacttcagttcaacaaatggtcaattcagtcagttttttaattgatttttcacaaaatggaaccggttgactgcttgactcaactagtcatttgtgtgatacagacgcaggcttagaagaataaggttgaactgggcagtggcagatggctaaggtcgagtttaaggaagacacagagaactctacccatgggtccgtatcatgggttcctgtcctcacatccatatcatcagttcatttagtgaatgaaatcataatccctgcctctcaaggtctcatttgatttcacattcagtggcgttttcagtctgtgttgaaagcacatgagatgttgacgcatttgcacacatggtgagccaggaaggaggtgacgagagtgaactgggaagagatcatttgaacattagagatgacgattctgtttactattttcttaagtccttactggaaatattacttttcatggactagaactaattggaagtaagatatcctgtaagtccatttagaaaaaattcttccaactagttctgagcacgctggatttgcctgagaaactctttgggctgcattctgagggtggcttgggtggatttgccttgacttgatggccttgaggaataaggaggcctgaatgggcgtgaaactgtgtttagaacttgagttggcctgacacagctctggttcacacttgaacttatgtggacacttctctgcctctccattattcatctttgtacctcctgcatctagcgtaatgttgaacacatgacagacgttcattagatgttcagagtctggttgtttgccagcctaaaatgcttagagtttattgaattgggttgtacatgctactaggacctatgactttggggaaggaagttttagggttcagcaacctttcacgttttgtctttttttttttcttatgggctaggatatttacccaaggtaaattcagagaacaggggtgcgcagtgttacatatggcattccccacttaggagcaagtgactaatatctgtgttaactgaagtctgtcttctcacaggttctgtgctgaagaaccatctcactggctgacaccccttaataagacattctgaatctccatgattacaagattggagtgtgttcagaaccagaggcaagcagaatagttcagagatgtgggtcgtaatctgagtggggatataagggccccgacacaggtgccaccgggcagctgctggaagtgggtttggagccgcacagtgtgcaccaaggtcagtcctgggtgggggacgtgcagccaaaggaccatccctgcgggattcagactccagatcccctgctttcccatcgccatgggatgcccagaatgttaggaacaaaatccttgctcacgaagtcggcctcacttttccctgcccagctactggcttccacgtcctcgtctttatgaactttccatcatgtgtctagaattccatcccctctgctccctgctgattcatgcccgccattttcctagggagctcagtcaacattcagctcttcaaaaattctttttctggcctcatctcaggactgtacttcattttgtagtttttccacacagaacttgtaagcactcttgaatcatttcatttatgtcccgactttttagctagcacgcttaagagcaacacaggccttgtttttctgtgtatatgctgaagcaagcagaactgacctacccaaacttaatagtatgaactgtgttaatataaattgtcagctctggagattttatttgattctcaaagtaactctgtgaaggccaggcatggtggctcacgcctgtaatcccaacactttgggaggccaaggtgggtggatcaccagaggtcaggagttcaagaccagcctggccaacatggtgaaaccccatctctactaaaaatacaaaaattagccggtcgtggtggcacacacctgtaatcccagctacttgggaggctgaggcaggagaatcgctcaaactcaggaggtagaggttgcaatgagccgagatcacgtcactgcactccagcctgagtgacagagtgagattctgtctcaaaaaataaaaaagagcaatttttattatttccatgtttacagatgatgaaactgaaattcagagaggccaggtgacttaactaaggtcacacagccaagtggaaggcagaggtgggatttgagtctttgctgattccatgtctattattctttctactgccatacactgtctttctggtttgctgattcaataaattttgccttgaaaaattagagtcacaattgtcttttgaaagcctttctttggaggaaatatcctctgagaaactatgattttttagaaaataattggacttagagaaaaggagtaggctctgcctaaggaaaaaatgtattacttagtcctttatcaaacatttatgggtttactctgtactgtgctagttgatgggagtgggactagggtcaaatgaggacatggtttctgtcctccctgaacccatagcctcgtggcttggagatgggacaccatggtggcagatgttgtgtgtgcttgtgaatctgaaagactgatgcctgatgggcatcagtttttgtttgtttgtttgtttgtttgtttttgagacagagtcttgctctgttgcccaggctggagtgcagtggtgtgatgttggctcactgcaacctccacctcccaggttcaagtgattctcctgcctcagcctccaaagtagctgggattacaggctcccaccaccacacccagctgatttttgtatttttagtagagacgggctctcaccatgttggccaggctggtctcaaactcctgacctcaggtgatctgcctgcctcagcctcccaaagtgctgggatgacaggcatgagccaccgcgcccagccctaatgttctaactcataaggaaattttaccttcattcactacgagtaggctcatactatacaaatattagtttctagagtccattgatggatgaagagataaacaaaatgtggtctatgcatacaatggcatattcttcagcgtggagaaagaatgaaagatacgtgctatagcggtaacatgaaccttgaagacattatgccaagtgaaataagctaaacacaaaagcacaaacattgtatggttttgctcatgtgacaggcaaaatcatagagaaagaaagtagaatagaggttgccagcagctagagggagggagaatgggtgccgagtttcagtttgggaaagtgaaaaagttctgggcatggcgattggtgatggttgcaaaacaatgtatgaaccactgcattaatgtacttcatgctcttgaatagtacacctaaaaatggttaaattgataactctcatgttacatataccacacagaaaattagttttcagaatagctgacaagctatgcttagatatgtctttaaggcaggaggaagatggcagtggtcatagcagtgtgtggaaagcaggagagaccccacatgtcaccaattagctctccaaatccagaaaacatcagggatgaacagcctccgctgcccatgatccgcgagctgtttcgctagcattccgaacaattctggcaaaggcggaaacactggaccaggatctgggtgactctttcacagttgattgggtaaggagaagcgctgttctcagagaaatgagaacatgtgtcttggaaggctgcctttgcttaatgttctacacgatccaggaggccagatggcattttatgtggttttcacaactgtgattttggattgattactaaacctgtttgtgttcctaacccagctcgctgcctcccgcctgccttttagcttaacgctcattcccagagctcagtttgaacaggcgcattgtttttattctgttccttattattattgcgttggtgccagcctttactaccttcagccctatttgctgcccagagtctagtgcagaaaatgaaatcctttttccaataagtgtgatcaaatgaaaggctgtcacactgcatttacatccaattctgggtttttttttttttttttttttttgagtttgggtcgcccacatgatgggttgtaaaaggataaaggataatttctgatgtcgtgccagcttttcctcacccagctgaccttctactatcagatggtattttcataggaaaggcaaattaattttatatctaatgtaagaaaaacattattaggaagattgtaatgaaaattaagtagtttgcaaaatgttttagaattttcatattacttttgcataaaaaacttctttcagttcttacaacagtcctgagacagagttcagcaggtgtccccatctcatgaggaaacggaggctcagagaagttagggggcatgtccaaggttgcccagctaacattggtcagagctggatctggagagcttatctgcggggtccacatccagaatgctttctaccgttctgctgtaccagctggaaaacaaaatcccattcgagtaaataatatcagcaatagccaccattttaagcaacttaccaggccatttactaaataagtctccttgtactgtagtaactctcatgactaaggtctgcagacgacccatttaataggctggcaaagtgagtcagagattgcgaggagaggctgagagcttcctgggaacatctctgttgatgtcttgaactgggttcccattgttccagcagggaaactgaggatagcagacattgcaaaatgtccttctgtgaagagacttctagtcgttttggtgaaaacacagtgtcctgctgcctagctgaaatcctggtatggataagtttatcttatcatctttctatttctagtacttggcccagatcgtgacctaacagcaactatttgttgagtggaacctccaaagatagcagtttcttcttgtggggaattacagtctattgatttgctcaatgcaagttcattttattaagatttcttcacctgtgtgtttatataaatagacagccaggcagtgcatgaaagtggctgcccggccagagtctggctgggctgcttcgttctactctggggattggacccagtagaattcttggacttggtgtggagtcccaggtcaagccaactcattacttctacctctcctttttaaaaagggttttctgtctttggttcaagttcctcttaaaacacaatcatcatcccttcattgatagaggcacaaatgaattattttttttcttttttcttttttttttttgaggcagagtcttgctctgttgcccaggctatagtacggtggcacgatcttggctcactgcaacctctgcctcccgggttcaagtgattctcctgcctcagcctcctgagtagctgggattacaggtgtacaccaccacacctggctaatttttgtgtttttagtagagacggggtttcgccatattgaccaggctggtctcgagctcctgacctctggtgatccacccgcctcggcttcccaaagtgctgggattacaggtgtgagccaccaagcccggccgaatttttaatttttttattgaaatggagtctcactctgtcacccaggctggagtgcggtgatgctatctcagctcactgcaacctctgcctcctgggttcaagcgattctcctgcctcagccccccagtagctgggattacaggtgcgcaccaccacacctggctaatttttatatttttagtagagatgggggtttcgccatgttgaccaggctggtctcgaactcctgatctcaggtgatccacccgcctcggcctcctgaagtgctgggattagaggcgtgagccaccacgctcggccgaggcacaaatgaatttaaacctcattgaaatgacagcggatggccatggctctactgtggtttccctgggccactttcttctcccgccttcctgccgcatgcaggagtggaggccgaggctccctggccaggctgctctgggttattacagtgatatatcttggaactgagcttgagcagggatcctcctgtttcctgttggaattgattttctgtccaactttcatttcctattgtgcattcctttggggtcagagcagctttctcagacaaaagcagggctttctgttttggagatattcctggcgtctcttcagctgcgtgtttatagaaatggacagcccggcagtgcatgaaagtggctgcctggccaaagtctggccgggctgcttagtggtactctgggggttggacccagtaggattcttggacttggcgcggagtcccagatcaccctgtcattggccctgtatcttaacttgtaggcacgtcttcatctgtcagatgggctttgttctctgaagcccgcatcagagagctcttcagaagagaggaaatgttatattgctgttatcatttcaaatgcttaccgctaagtgaatctggttcaaagcttaacagcctgtgggtgaaccgcaaaagctcaattggatctcaaagaaatccctggtcaagccctgtgccttctagtacccaattatttatcaataagtgtgaagattgcaacctccagattattcagccattgttgagatgtgtaaaaacggtatccccagcaccttgaaaggctaagtaggatcaaccccccagttgttgttcactttctgtgtcctcagaatccacttttgtttcagtccttctaacccattctcattgttttctgtcagtgttggaataagtggaatagcagggtccataaactctaccacttgattgtcaggaatgaagaatttggttttctctgttgtcataacattcgtgagtacatctgtaagcaggcattttcccatcatctttcccgcatttctaatgaatgtgacatcagtctatttgctgcttcataatcaaggtcctgtttgttgatatgtaatcaaagcaaccggattatgtttgtcagtacgagtcagaaaaatctaatatatatttactctgatgccataaggagtgtcagcctttgctggcctcaataatctcgtcttgggagagaaagctcataatgtggtgaagataccgttttgggattatttctagaacgtgatagttgtgccgtgcacatacatgtccaaatgcattgagtcatgtgatagcatccagttttatgcaaccaaaattggacattatattgtttggatagagtgctcaagatgggtggttcctggatagagtgttgaaggcagtggtgccatcaattcagcagcaaggaacttaatagctttctcatcacagtcctcacctcctccctcctttttctgtgtcacagaagcagtaagaaacatcgaggaatttcccaacatatcagggaatttgttatttcttctaaaacataaggaagtacgtggcaatataaatggcaaatgtgcggggtgcggtggctcacacctgtaatcccagcactttgggaggccaaggtgggcggaccaagaggtcagcagtttgagaccagcctgcccaacatggtgaaaccctgtctctactaaaaatacgaaaattagctgggcgtggtggcgggtgcctgtaatctcagctactcaggaagctgaggcaggagaatcgcttgaaccttgggggcggaggttgcagtgagccaagatcgtgccattgtactccagcctgggcaatagagcaagactctgtctcaaaaaaaaaaaaaaaaaaaaaaaaagaaagaaatggcaaatggacatttacatggtgattagaaaattagaatacaccgggaaatctgggttctgttctcagtcctacttgtaacacatccactgaccttaaacacatttctttactttgctgcacctgaattcccttatctgctgtaaaatgaatttgttgaactaaactaaatgttctttttttttttttttttttgcgacggagtctcgctttgtcgcccaggccggagtgcagtggcgcgatctcggctcactgcaagctccgcctcccgggttcacgccattctcctgcctcagcctcccgagtagctgggactacaggtgcccgccaccacgcccggctaattttttgtatttttagtagagacggggtttcaccgtgttagccaggatggtctcgatctcctgacctcgtgatccgcccgcctcggcctcccaaagtgctgggattacaggcgtaagccaccgcgcccggccctaaatgttcttaaagatcctttccagccctgacattgaactcagtacatcaacttacatgatttattcgcacaatcttagcagaattaatttggatttgttaattgtttgcatctggctaattattgcctgcacaccgtaagactatctaacagtagtagtttcttatattaactaaaggtgctgtgaaggaaacatggaattcccccaaaatcaaaactaaaagaaacttctgctttagagcaaacactgataaaatatacataaggcaccctagctgcactgggcccttctgccctcttcagcaagtcctgcctgaggtgcacacaattattactggctcttgtgccacaaagtgacatcgtctttggctgtgacaccacatgaagagggaaggaggtgtgagactgtgaagacactcagtacaggtgcagcctcctccacagagtaaatgtgatacttctcgagttaatgactatgttgggaagttttccaactccaccatcttccctgcttcaacgaggatcccagggggaagctcacagatttgcagatctttttacactaaggaagaataaagcagcattccagttgcaggagtataagccagccacagacccagggggcacatcttacactgtctttgggagaaagaaaaagtactaataacaaataaatctgatgggatttcagatggattccagtctcattcttttgtgatagcagggagtgaggttttgatatattccctctagagatggttctaaacatggagacccatcgatatccaggtatacctcctctcctctctgatcaatccaattgctaaacaagaccagagcaaggctcagtagttgatggcaagtgcttctgctaattgccttgcgattggggaatcaggaggatgtttttattcaggaaggcatgtctgaccaatgaaacaaaatgcagttggtatcattttagatttggctcttgaatcgtcagaaatatgtgccttcactaactttgaggaggaagtatcccttctctttgggtatctctgggaagttgctttattgatttttcaccagtttgcagacaagcccaagtctaaaaaaaattcagatgtagcctaatactgcaagcctttcttttatctgtctatctatccatctgcctgtctgcctgtctgcctgtccatccatccatacgtccatccctccatccatccatccatccatccatccgtctacctacatgcctgcctacctcagcctcccggatgtttgaggctgcagtgagctatgatcacaccactgcagtccaaactgagtgattcatgattgcaccactggactccagaccaagtgacagaacgagacagacccatctttaaaaaaaaaaatgattatgagaggtctcagtgcagaaatggcttcctcctgcccattgtgccagcttgcccaggcccagaggttgagtcatgatatgaatgtgctgtgtagtgtccagcaccagaagtgtgggtatagtggaggaaaaagatacagagccagaaccaggacatggaaacatttttaagctatatgtttttaaaaatcaccacccccatgctagagagaggactgaattaggtttctgttttctctctaaaattgatataacaaaattgttgtcatgtgaagagaaaatcaaagagtatgctgacaaaatatgtgggaaaatctaaagcacagggacaaacgaaaaaaatagatgacttgggactatatcaaaatggaaagctttttttgttgcaaatggtaccatccagaaaatgacaaaagcaacccacagaatgggagaaaatttttgcaaatcacatatttgataaagaacctgtacccagaatatatgaaagactcttgccactcaataataaaaagacaagtcaattataaaaatgagtaaaagatttgaatagacatttctccaaagaagatatacagatggccaataaacacatgaaaagataattcagcagcattagctatcagggaaacacaagtcaaaactacaatgagatacccctcatttatactcgcatggctagaataaaaaagataaacaatatgaagtgttgatgaggatgtggagaaattgaatccttatacattgctgttgaaaatgtgaaatgaggccggtcgcagtggctcacgcctgtaatcccagcactttgggaggccgaggcaggtggatcacgaggtcaggagatcgagaccatcctggctaacatggtgaaaccccgtctctactaaaaatacaaaaaattagccgggtgtggtggcgggcgcctgtagtcccagctactcgggagactgaggcagaagaatggcttgaacccggtaggcagagctttagtgagccgagatcgcaccactgcactccagcctgggtgacagagcgagacgactcctcaaaaaaaaaaaaaaaaaaaaagaaaagaaaatgtgaaacgatatagcccctgtggaagagaacttggcactttctcagagagttaaacacaatgttatcatatgacccaacaattctacccttgttatgaaaaaacatgtatccacaaaaccttgtacatgaatgtttatagcaacattattcataatagcccccaaatagaaacaacccaaatgtctatcaactgaagaatggataaacaaaatgtggcatgatctatataatggaatattacttggcagtgaaaaggaatgaagtgtggttcattcattgaaatattatggtaagtgaaagaacctagacacaaaagatgacatattgtatgattcctttgatataaagtgtctagaagaggcaaatctgtagatacagtatgtagattcctcattctcaggggctgaattgggacgttgcagctaatgcatatggaatttattttaggagataatgaaaatgttctaaattcgatgatggttgcacaaccctgtaaatatactaaaaagcatagaattgtacaatataaatggatgaattatatttcaatagagctgttttaaaaatattgaaaaccagagatacctgtctgtgctctaaaatgtatccactgccttctagatacagtctaaactctgcagcttggcttttaaagccttttatttatatggaatcctccccaccccccaccatctatacatttgtaaaccttacatgttattcaaatgccataattcgtcaaactggatatgttttctccttccagaaagatattccttcatccctcttataagccttagcactgtctgccttgcgttatatttatttctgtatctgtcatatgatctctatctgatcgagagctctttaaggccgggatgtcggcttgctcatattggcatccttcaggacacctgacccctaaacttatctgattggtacgtgatacatttttatcactggatagaatgaatgggttgtgaaattattagatgtgatcccagataggatactgtttttactaatctctttcacaagggtctttcaagaacaatgcaggatcaaacttataaagagatttttgaaactctcaaaactctgtgcagggtattattattatctgtaatcctggtaactattcaaattagtgtcaattaacttttggctgcactcttaagattctttatcatctacattagtttgtcagatgaggtaatgcactttttctgggtacagttgtctttgaagagattggcagcgtttcatagttgtaaacaaaaccgtctcatatgccggaccgtgacaaagagggactaggacgccagaagctctgtgaaaacacttaaatccatttcagcgaggaggaattgtgatctggtaaataaattagtgttctgctctgttccttggctcctctgctaatgaatgggccccagagatttttttttgtcttgggtgataagcccctaatatctattcaagttcagcataaagctcattttctctagaaatctttgtttaaaaacagaatttttccagtaaatatatttatcaaattaaaagtatttcagatacacagagagtgatataacaaacaaaccaccgcctgtgtctaacaaatgctggctttttgtcatatctgctttggatgtttttttagttgaaaaacatttcgaagatagttgaatcattcctttccttcccaaatctcattgcccctccctccctttcctctgaagccacaattatctctaccaggaatctctctctctcttttttttttttttttgagacggagtctcgctctgtcgcccaggctggagtgcggtggcgcgatctgggctcactgcaagctccgcctcccgggttcacgcaattctcctgcctcagcctcccaagtagctgggactacaggtgcccgccaccacgcccggctaattttttgtatttttagtggagacggggttttaccatgttggccaggtctaccaggaatctttaactggttaatctttcagtccaactttgatatcaattgttaactcttgagaccattttctatttcaaaactgtccatctgactcgtttctattactctgaaataatagaatctcagaattctgtgatctaccttcaagccgattaaatgggaatttttcccagagagagtttaaaccggcctctgggttaggggagaagtatagaccccaaagacccttacagagaaatacttgtcatcacgctcctggaattctgggagagggagaggcatgagaaggctgtgtggccttgtctttgaaatacagaagtttggtgacgcctggaacattttttacatgacaaatatggtgaaatttaacaggctatcaaagtgcagatcaggccaactgaatagcagttttggggaaaatgacaaggtgctaggtagtggagagaggaagattaaataacctacttgggtctatgtgctcgtgaagacacgctcatatgtcttccttgcatggatacctgccttgctctaaaataaacttgaagtgtgtttttaaaaaaagcatgtgtgcagcctgggtaacatagtgagaccttgcttctacaaaatacaaaataaaaagagtagccgggcatggtagcgtgcacctgtagtcccagctacatgggaggcggaggcgggaggatcacctgagctgaggaggttgagtttgaggctgcagtgagctgtgattgcaccacttcaccctggcctgggcaacagaataagaccctgtctcaaaacaagacaaaacaaaaacatgaatggaacaagaaagaatcatgaggtgaggaaatgaaggttaagggaagatgaggatcagagggagtaacaggttcagttctaagatgaggtccgcatgtggaatacataccattaggcacgaagctcgggctggaagtaccctacagactgcaccatgagcttctcaacagacagtgggtaaaggagtcagtgacagaatctagggcttttaagataaaagcaaaccagttggccaaggaagaatggctatttccagcacagatgcctgagggccattttttctgaggatgtggctctcacccttgatggacaatcaggacattctagcaaatgtgcattgtgctctagaggggtgtgtgcagggagcatagctgagggatggaggggctcatgtgcatcaggattgcctggaataccagggattattagtgccaataatgctgtcaatgacgttgtgatggttaattttctgtgtcaacttgactgggccgcgggatgcccagatatttggtcaaacgttgttcttgggtgtgtctgtgaacaaatagccctcactggtgcaggtgagtctcatccaatcggtcgaaggcctgagtagaactggccttcccgtgagtcagatggaagtcctcttgcctgactgctcgatctgggacatgctgctttgggactccagctgaaacatcagttcttcctgggtctcaaggctgccagcctttgggatggaatgacgccatcgggtctcctggttctcagccctttggactaccactgggactgtggtgatagtctctcttgggtcgccagctggccaactgcagatcttgggatctgtcattctccatcttatgataaatcaataaatacctctctcattatatatataatatataatatgaaataaattaataaatatctctcactatatatagtgatatatatatattaggtatattttatatatatgtatatcctattagtcctgtttctccagagaactctggcgaatacagacattccatatgcaaagagaggccgcgtggtcttaggtactagttgtaaaattataatatatattatattatatataatatttaatatatataataaatcaataaatatatatctcactatatatatctcttactatatatataaatcaataaatatctctctctcactatatgtatatatatcctattagtcctgtttctccagagaactctggccaatacaaacactccatatgcaaagagaggtcacgtgatcttaggtactagttgtaacattataatatatattatatataatatttattttatataataaatcaataaatatatatctcactatatataaatatctctcactatatatacatatcaatcaataaatatctctctctcactatatgtatatatatatatcctattagttctgtttctccagagaaccctggcaaatacaaacattccatatgccaagagagatagcgtggtcttaggtactagttgtacaattattttacatttgaagaggtaaacctttgggttcataggctttctaactgatgtcatggagtggtgggagggttttgttttcccttatccattaactttattcttaaaataacaatatcactaataacatttatggcatacttgtaagcacttcacatatattctctcacttagcatcatgacaatattctaaggggactgaggcactcagagcttaggaaactcgttcaaggtcacctagctaggaaacgatgtgctgttttcaaggccctcatctgaataaaactatcttccctttactctcagcggtgaaaatgggggagagatctgtattggaagctcattcagatgttgccttcttttgcactcgaaggctttgctctctgaaggcaggaagcagcaggcacgtgtgcagggaaggctgtgtatgtggcatgtgcaggcagcagcagcaacgcgggacgatggggagagagcccaggggagggaggatgcctgcagaagcggctgtgatgtgtgggaagccccgctgggccggcactgtggaaaggtgacctgcagagccacagctgcaaatgaaccactaattttcccatctctgcttgcaatttacaaagcactttcctggtgtcatgagtagctcccaagtatcagagcagggattgaaacttaagttgtttgacgctacactctgatttcctcaccccacctcactgtcttgccagttccaactgtacccctcaggaatttctatcaggagtctgtgtcaacatcagcatgaagctgaagaaggagaaaggaaatggggcaacaaagcacacagatgttcctaaaaagcaaaagcggaagagagaagctagactcgcctgtctctggtttttctcaccgcctgattgttcctttcagatgacccgcatctctcggagctgacctcagctcagcaagggtgcctgtgacccatggagcagtggccactatctctgcattgtgggagggtggtccgtgttgggtctgcagggtcgttgtcacagcgatgaatgtgtagatctgtgcttgctgaagctcaggctggtcgctgtcttgtcatcgtctcctgttacacagctttcaggctgcttttttggggaagttagactcgcctgctcttttttggggaagttccacctcactgcagccgggtatggtggtttgctcctgtagtcctagctacttgggaggctgaggcaggaggattgcttgagccaggagttcgaggctgcagtgagcagagatcacaccactgcactccagcttgggtgacagagtgagaccctgtctctaaaataaaataaaataaaaataataaataaataaataaatcaccccttggccaggcgcagtggctcatgcctgtaatcccagcactttgggaggccaaggtgggtggatcacctgaggtcaggagttcgagaccagcctgggcaacatggggaaaccctgtctctaccaaaagtacaaaaattagcctggtgtggcaggcgcctgtaatctcagctactcaggaggctgaggcaggagaacggcttgaacccaggagacagaggttgcagtgagccgagatcatgccattgcactgcagcctgggcgacagagcaagactccatctcagaaaaagaaacaaaaaaatcaccgtttaactcagaatcagccacgctgaattgaggtgaggttttatgcatatcagattgaagacctcctccggggagtggtaggctgatggcttagtcatcctataaagagcccagcatctgactgcacagctgggtctacctacagcatggagatggctatctgggaataatgggcactagaattggaggatcctgatgaaccacttcctggccccttgcttgtgccacctcccttcccgccaggtaaatattgcttagacacccagcttctgattaaagccacatgatggaacttgtcctaaggatgcaactgatggcccgtgtcagcttgttggagttaaaaaatatattttaatttgtttagctctctggggaaattatctgagcctgcatgtgataatcaactttcacatgagctttcaagagacctgaaatgatttgagcaacaaaatgagatttttaatctacataaatacaggagtcgtttgcctctctttttgtgtgtatgcgagaggaggggagcttaaaacaattctaattcattccttttcttctcccctaggacactcattagcaatggtaggaaaatggtcacaggagtggtaccttgcctcacattctcacacacattttccctttggactttaaacttcacatcaactcttaaggtgggggtgggcggtagcaagtgttgcttcccctttttatggaaaaaagtaggtctcagagaggttacgtgacatgcccaagttcatgtgctggtgggttgcagagtcagttctagagcccagttctttttggaaactggatcaatgctctttctacctcaccagctgtctcatattaatactagagatactaatgcaaaaacactaccataatagtatctgcaagagaacaaattcaagggaagatggatggatactggccgggcgccgtggctcaggactgtaatcccagcactttgggaggctgaggcgggcagatcacgaggtcaagagatcgagaccatcctggccaacctggtgagacccgtctctactaaaaatacaaaaattagccaggcgtggtggtgcgcacctgtagtcccagctactcgggaggctgaggcaggagaatcgcttgaacctgggaggcagaggttgcagtgagccaagatcatgacactgcacttcagcctcggcgacagagtgagactccatctcaaaaaacaaacaaacaaacaaacaaacaaaaagatggattgacactgcacctgcctgcatcagccaggctaagctgggttaagttgtggctacaccagatgtctatggcttcactggtttatgcaaagtcccctgtggggccaggtcactctccagggaagatctcatgacttccatgtcagcaggacttagggtgcactgaagagggaaagcagactgaagagctttgtcgaaagggtgtttaagtttggcagcccaaaaatgacagagaagttcatagccagtcacagcctgtgggctggctctaattgtgcagccctgcccgatgcacgggcggttgtgaaactgtgtcttccgagtgtgtaagaaggggagaagacccggaaatactggtgaccactagccatgagcaccacatggtctgcaggtctgagcggtcaaaagatctgttctgtggagcaggctcccctttaaccatgtccctgtcacagatcccgcggcaagcattcacaccacctggaattaatcgggaagaaagtcgcagtgtttagcagatatttcacagatataaactgtgcggtcttcctaagtctctgcacatgatcagctgaagattgggcttcttgtggtgcacataccattttcgtcattaaatccccaatgactcaccttgtcctgaaactgttaaagctccttagcaagactgaggcccatcctgatttgggccccgacaccctccccagtctcttctttcatggcacccctcctgtcatctgggtttgtgaagctcctttcagtcctctcaaaagagcgtttctctcttccccctctcgctctccgcacctgctgttccctccgctttgaggtatttcctcctcactcacgtccctctttgtccaggtctcaggaggcctgctcttgtatgtgagtccctagctagatggcaaaccccttggggtcagagacagggactcctggcagcacttgcccttaaaaacttatattcaggcggggggcggtgactcacacttgtaatcccagcactttgggaggcctaggcaggtggatcgcctgaggtcaggagcttgagaccagcctggccaacatggtgaaaccccatctctactaaaaatacaaaaaaaaattagccaggcgtggtggtgggcgcctggaatcccagctactcgggaggccgaggcaggagaatcgcttgaaccccagagggagaggttgcagtgagtcgagatcgtgccactgcactccagcctgggcgacagagcgagactctgtctcgaaaaaaagaaaaagcaaacaaacaaacagcccttacattcagcatagggcttagctaatacatggaagcaactgactactatgtgttcaataagcaaatgaatggtcgtgtgaatggataaatgaggtctgtgaagttgaatgcttgtctgggtgaggggacgtctcctggctcaccctcacctctgttggctgtgctgcaagctgtagtcaggatggtcattttccagctttgaccatgattgctcttgcttttggtgtcagcgcctacctgtatggtgccctccattcgtcagttgccttatatcccagcacgcttcctcaagagctgaagaaacgtcttacattttcatatgaaatcattttcaagcaaggtatagattcacataatacataattaatggtaaaatgctattagcattatgtacttaaattatttggctttaaggccaggcgcggtggctcacgcctgtaatcccagcactttgggaggccgaggcgggtggatcacctgaggtcgggagttggagaccggcctgaccaacatggagaaaccccgtctctactaaaaatacaaaattagctgggtgtggtggcgggcgcctgtaatcccagctactcgggaggctgaggcaggagaattgcttgaacccaggaggtggaggttgcggtgagccgagattgtgccactgcactccagcctgggcaacgagagcaaaactccatctcaaaaaaataataaaaataaaaataaattatttggctataatccccattggagttactgtttaatgggtagagagtttcagtctgagttgatgaaaacgctctggagatggatggtggcaacagttgcacaaaaatgtgaatgtacctaatgccactgagacccacacttcaaaatggttcaaggtacattgcttgagcctaggagtttgagaccaggctgggcgacagagtgagaccttgtctgtaaaagaaaaaaaaaggccgggtgcagtggctcatgcctgtaatcccagcactttgggaggcctaggcaggtggatcacctgaggtcaggagttcaagaccagcctggccaatgtggtgaaaccccgtctctactaaaaatacacaaattagctggacatggtggcgggcacctgtaatcccagctacttgggaggctaaggcaggagactctcctgaactcaggaggcggaggttgcagtgagccaagattgcaccactgcactccagcctgggtgacagagtgcaaaaaaaaaaaaaaaagaaaaagaaaaatatcagtcgggtgtggtggtgcacgtcgtggtcccagatactcaagaggctgctgacgtgggaggattacttgagccccgtagatggaggctgcagtaagccgtgatggtgccactgcactgcagcctgggcaacagatgagagagtaaaaaatggttcaaatggcaaattttatggatacttcgccacaataaaaataaatttctattaaagtacatatcattaattccacaaatgcaaatagaataccaatcaaaggaagtcctcagaacacagactgcacagtaaagtgtgggcctaactagaccacagcctgtttcatgtcaccaggcttagtggatgaccgcactgcaaggaaaattgctgagactgagtcatgttttggttctctggctgcttctattttttttttttttagatggagtttcattcttgttgcccaggatagagtgcagtggtgtgaacctccgcctcccaggttcaagcgattctcctgcctcagcctcccaagtagatgggattacaggcacccgccaccatgcctggctaatttttttgtatttttagtagagatggggcctcaccatgttggccaggttggtcttgaactcctgaccccaggtgatccgcctgcctcggtctcccaaagttctgggattacaggcatgagccaccgcgtccggcccctgggtgcttcttattttggaaaattcttccccaaatgagactaattttggctcagtagaaaaattctctcacctcttgtcccgaaggtgaaaatccacctcaatgattttcaatttttttttaatcatcatcggcctcttttattttttttctgatagaatgtgctttaagagatagttgtagcctgtttcctattcctgcatttataaagtaacaattcatttatccttgccagctgtctgcaagcttaaaatacctagacacatctcaccacccagtagtgtccttgactggcttggatggccagtttccctatactgatttggtacaattgctacattttatagaatacttaaatatgaatacaagtgtgatttctgtggggcttttgacaaaccagaactagttcaaggaccctcacaatcaccttcaagggacaaaaacctgcattttgtgtgtttcctggtgcgtttcctttaagagtcctggcgcctgggctgtccagcccgggtggagggactcccgagacctggtgatggatgctgtagtcaggagtgcatattggatctgttacacggtggtgatatacgatttcaacatttcagggttgatttggattttctgtactccctgcctggaattttcctgctgtgttgttttgtgctttactgttcaacaagaggaaaataaatctagaaacctgcttaaaaatagacatcctgttttcaattctctatcattaaaagatcttaaaagctagaatttagttctcttcccggtagaaggaaggagttgcgctaaggtcccttcttagaaattagctctagaaatcctaaaattctagctaaccaaccacagtgttcacgggcctaatatcccttacatttttcttgtctgacaggcccagagggctcactgtctgtgagctttcacggggttgttgctatcccccagggttgattgatctgtttattctaagcttgaggccagagctggaagggaggccgtttgttttgggcactgctgagaaaaacagactaatcacctaaataccaccttggggaatgaagttacttgaaaagaaactgaatggagcctgggcttttatttggaatgaggaggcaaacctgggaagctgcatgccgctgaatgatgatgaaaagcacaaagctactgaatgcctctggcttggccgccaaagagaattggtttctgtaagtgtcggagagggaagacccgcattccagagctgcacccctttcttcacatttccggtccctctcccccagctcctgcacaccctgatgctggaccaaggggcctgggcagaggtgggtgtgctgggcgggaaagtacgtcatggatgcctcaacttgccatggatggcaggttgacttccttcccagcaacttgcagatgttcagatgcgcagagttaaggtctaaaacaagaaaagtttgctaacgtagagtggccgctgggtcttatctttccgtcttcaatggccttgaaaaatatggggcacgcatggggatttcacactcttaacaagctaatgtctctaacactacaggttacacttcacctgatttccaggttagtgcagcgcctgacctctctccagaggcaccctcgtttagaagcatagatgatgcaaaaacatggtttctcttctcagttcagattgcctctgttgcaaggactgagaactctgaggagatctaggagatccctaagtatattaggttttaattctgggtcaaatcagcaaatgtttattaagtacacacaacagacagggcactgtaagacaaaacaaatcaatcagtcaacgtcaactcttgtcattgcttggggggtaaaggcaatacaaggaatgactggcaaatacaggtgtgaattccacttaccctcagcaagacgagggaagaagaagattctggaaagggagaattctgccagcaccaacctgatcatccttctgggcatggccaaatgcctccatttttcctctgaggggcttctttgccctgaggaatatacaagttgatagggctacttgccttcttgctcattaatatctgcttggctccggatctgcaggtagagcagtgctggaattatcccagagctgtgttgtgacctctggatgctagcctttccaagcagggactttgctgcgactccctaagttcatagggaaagcagcaaggatgagttcgggagactctggcatatgcatcagagttccagagtgaaaggtggctctgaaaactttgcaaactgtacataactcaattccccaggctgctgtgtgtccgtcatccctgaaatttcatgaggccagagtaggtcaacaggggctaatgagacaagatctaactaaacagagtaaagagtttctcggtcacaagggaaacttttactatttgaaatcagcctgagccaagattgatgaggaaaaaaaaacaaaaaccaaaatctactgcattttactcctatttaggaagaagtaaacttttgtaaacaggaagaacacagggatatttgctcttagctagaatggggcaaattggcaacagttttgggtgcctacggctttgggtttgatggagtcaacctgccactaaggaaatagacccaaggaggttaaactcagtagagagctatgggtattcctttcctttaagttacagctcccaggaaagcaaaacacaagctgaacaaacattatacaagccatgtatatgtgtagcatgtgtccagatccaattcacttatttgctcacgcttctaggaactccatccttgtgcttttatctcctgggctctctgactttgagacttttcacagctgtcatcatttagcataaataacagcctgcggaagagtgggtgacaatgtggcattttgctgggccacttcttgctcagcatttgtcgtggagtcttctgccattggccatgtgccaggcctgacaaacagccatcaacacaacttgtcaccaagtgattttgaaaacttattgttgaggtgacttcattcttacatctttcgtgcttggcaaagtaattactacgccaagttttttttttttttaatcaaaataaaacactgattaaatgttttcctgtatctggattacaaactattccgtgatctccaaactttgtcctctcgtgtgtgtgtgcatctcacacaatctctgtccttcttggaaaaatgtctccattaattactggggatgaaagttgattaaaattgtaggtcatttcccagggaggttttatgtgaataactttagtactgtgatgcactacttatgaaatctctggtctctttctaaaatcaggttggagaagaagagactgtgcatgacagtgcagccatgtggcttggagactatgtgagtggaagcattttgaggatacgatttctgagtccatgctatttctctgttgtagcttagctgtggattccttacgtgcgaatgatttgggagtataagaacacagactcagtgtcatcattttgtctaccattaccctttcctttagaaaatctgtttgtgtcattcatttagaatgttgccgttaacaaagtattttatgtatactattttatttggacattatgatggtccacgctgtgaggtcagccagctattgttcatatttgttccagatgagagactggaggttcagagcagcaatgtgccctgcacacctccacacagttcacacagtgctcagaacagcaatgtgccgtgcacaccacacaccctgttcagtgcagaggcagcaggcaggaccccaggacttctgagtcctgatccaaagctacttcctcaaaatccctttactactttattattattattttttaaatagactttttaaaaagcagttttcagcttatagaaaaaaagtgaatgaaaagtacagaattcccatgtgccgcctctcgttctcctcagtttcccctgttattagcatcttgccttagtgtgctacgtttgtttcaactgatgacccaatattgatacgttattgttaactaaagtttatagtttatgttagggttcactctttgtcttgtacattgtatgagttttgacaaatgaataaagacccagtgatcatgatcaagtgtgatttccccaaagtgagatgtgttgtccttcacagagcacacttagtgcagtggcggtcaatctaactggttttttttgttgttgtttttgttttgttttatttatttatttattttggtggcttagtctcctctgtcacccaggctggagtgcaatggtgtgatcttggctcactgcaacctccgcctcccaagttcaagcaattctcctgcctcagccttctgagtagctgggattacagacacacgccaccatgcccggctaatatttgtatttttagtagagatggggtttcattgtatcggtcaggctggtcttgaactcttgatttcaggtgatctccccgcgtcgtcctcccaaagtgctgggattacaggcgtaagccaccgtacctggcctgtgtttttcaaatgtaaacaaaaggccatcaagcagtgacagttcatctcctgacttcatttttattgtcacaaaagtgttctggttagaaagaaaaaaaatcacatatccaccattacagtatcacacagagtcgtttcactaccctaaagccccctgttctctctctattcatccttcccaccatccaccctcatccctggcagccagtggtctttttctgtctgcacagttgtgccttttctagaatgtcagatagttgtaaccatgtactgtgcctttaccaccatgttgagccttgatgtgtttccttcgttggttttatcaataacaacgaacattcactggtttctttccatcgaagttacattttttcatgaaggtaaactcttaaacaagtgtctctttttgtcaccctctcctaggcctattcttgctattggttagaatgtggccaatagattcacctcatggtagcaatgtccttgctgaatataacaaatctgatggttgtcatctaccaagaattttgtttctctgaggaaaatcagcaaaactctcatttcagttctagtgtagcctagccatgctaggctgttttgtaaatgatgactattaggagatatttgtatccattgagatggagaacaccgaagcttcgaaggaggaaacagcttgcccaagtaaagaccattaggagaacacaaaataaccaccaaggcttccttattcccatttgagatgctgctgattgagccgcaattggccagtgctctaaaaccgaggcctggaaaggacaggccatgccagttcgctcagccattcaacccagcagccctgactattgtagccaaggtgatggacttgattcccatagaaagcagcatcaccttggagctcacctttaactcctggaggctggcagggcccctgtggccacaactagactgtgagaggaaccaagaaagtacgttgagatcttggaaccaacccaaatgcccatcaatgatagactggataaagaaaatgtggcacatatacaccatggaatactatgcagccatagaaaagaatgagttcatgttctttgcagggacatggatgaagctggaaaccatcattctcaacaaactaacacaggaacaaaaaaaccaaacaccgcatgttctcgctcataagtaggagttgaacaatgagaacacatggacacagggaggagaacatcacacaccggggcctgtgggggatgggggataaggggagggagagcattaggacaaatacctaatgcatgcggggcttaaaacctagatgacgggttgataggtgcagcaaaccaccatggcacatgtatacctatgtaacaaacctgcatgttctgcacatgtatctgagaacttacagtataataaataaataaataaaaatcacacacaaaaaggaaagtacatttagatctcatctccctctcaccccaaatccaagaacagaacaactcagacacatgtcctacagatcagcacacaatttttttgtgattgaagaaacgaatactaacattggttgatggaagagacagtactctaaagtcagcatgataatggacagaagaacaaatgatgcatctagtaactgatgtttaacaactgattacctgtttgtatggcatatttaaacattattgtgttttctgctgtttgggtagtggttgtttataattattaaagatgccccgagtgacaaagagacgaaggatcatgaacatcttaaaacacttcttgctttttaacaagggcagagcaaagttgttaaaaaggtaaccgagggtcagataaccaatgattcattgatgatgaatgctcattcttctagtgccaatgtggtaaaatgtggatgtttttaaccttgtaagttaggtggcagcatagtctagtagaaaacacctctagctcatggatgaacgtttctccaatttgctcccaagtctcttattgatactatatttgggtgaccctgggcaagtcctattgatagttggctttgacttaggacaaatgaggttacacagactgagagttttgtgttggacttcaagtacgcttctagactaaaagcattatgccattaatatttatgttatatagcttgtatataagtatctctattcctattatcttattaatgttcacatgtatggatgtgtatacacgcatggatttgtgtagatatgtgtggttgtgacgtatgtattttgtgtcttacagttttgcaaagctcttttgcagacattacctcatttgatctttcaacagtctctcagaagggggatgtccttgctttcattttataaatgtggttgagagaggttatggttcctgaaacttgatacaattaccaagtttctgaaatataggaaaaataacttcattgtagacaaaggtcacaatttcaagaggctttgtaacgaaattatgaacaagtttggaaaaactgcaagaaattcattgaacaaaattaagaagatcagccttttgagaaaggtctctcttgatggcaagaccgagcagcatctttcactgagccacagatttgtatggcggattggatttctggggaaggttctcctcagaacagtgcccttcagtccaccggaaagtgccactccaatttttagttaagaaaggctctgaaaagacccactctcaaaggtaccacctgttcatgtagtcattaatttgttaactaattaatcgacccatctatttattcgcttattcactcaaaagcatttaccaagctcctactgtgtgtcctcaaggacatccagctgtacgggaataaacaggggaagcatatggtggacttgaaggtggagttggtgtggaccctgccgtgggtggatggaggtggaggtggggtggtcctgccatgggtggatggaggtggaggtggggtagacccttatgtgggtggtgggaggtggaggtggggtgggccctgccatgggtggtgagaggtagagttggtgtggactctgccaggggtggttggaggtggaggtggggtggaccctgatgtgggtggttggaggtggaggtggggtgggccctgccatgggtggtgagaggtagagttggtgtggactctgccaggggtggttggaggtggaggtggggtggaccctgatgtgggtgattggaggtggaggtggggtgggctctgccatgcatggttggaggtggagttgatgtgggttctgcacagcttaggctgagcaggaagtgtattttcagacctggaatagactccctatggtggacagagttgctggaaaaaatatcagaatatattgtttaggacatctcatcttcaagacatagattccccttcttatggaattttgagatgtcctagctggaggaagaagaattctttccatggaaacaataaacagtcaaaatgtttactatgaaattcatggaaatgctctgccagaggctcgggaatctctgcagagaacattttctgtactgcaggatgacagaggctgtcgagaataaaatgaagctgagtgcttgtggttgggattccttctttttcctcttttattgtttctccttagctttgtgcccaggtcatttgtctatcttccttcccttgaaatccctcctgctttggggccctgcactgcctctggagcatccagttctgagattccaatcacagggccaggcatgaaacacggccatccctcaggcacacggctgctgggatatggcaagcttgttaacacggcaggacaacccaagatgccatgttcctaaagaaaatgggggccgggcacggtggctcatgcctgtaatcccagcactctgggaggtcgaggtgggcggattacctgaggtcaggagttcgagaccagcctggccaacatggtgaaatcccgtctctacttaaaatacaaaaattagccaggtgtggtggcatgcacctgtaatcccacctactcaggaggctgaggcaggagaatcgcttgaacccaggaggcggagcttgcagtgagtcaagatcacgccactgcactccagcctggacgacaaagccagaccttgtctcaaaaaaaaaaaaaaaaagaaaaaaagaaaaaagaaagaaaatgatattcattgcccacctccttacacacatacccagagtggagttaatcctttccatatctgtgtacccatgcttctttatatatattaagttgaaccatatgaaattgccaggattcacgatcttgacctgcaaaaataggcagtttcatgtagttgcacctgctatgtgtggcatttgttctcactttcaccgtgagcgtcatttgttgactttagcttaaaaccaaccttattccactgcatgccaccttgtcctcagagaattcataaagacaggcttaagaatccatttcagctgggcgcggtggctcacgccagtaatcccagcactttggaaagccgaggcaggcagatcacctgaggtctgagttcgagaccagcctgaccaacatggtgaaaccccgtctctactacaagtacaaaattagcgggcgtggtggtgcatgcctgtaatcccagctactcaggaggctgaggcaggagaatcgcttgaacccaggaggcagaggttgcggtgagccaagatcgcatcgttgcactccagcctgggcaacaagagtgagactccatttaaaaaaaaaaggaaaaaaaaagaatccatttcatccagccttctgattctaggaataggaacgtcaattcaatccaatgaatcctgggacagcatttggtgtgccaggtagagcgtgtgtggcggagggggggtggtattgtttgtgacgtaggttttctgattggaactactgttgcaggcttgaccatcacctcccactactgcgtgtgaggctaaatgctgctccctcgcttattgctaaatggagagaatacgagggagacaatggggaacgtgaaagcaacaacattgtcaactggatttgatgcagggcagtgggcagggactcagaactccactccccctactcagacgggcaatcatgtcacagtcaagatgagaaatacccatcgagatttgagtgcatgtgactcttctaaaagtaaggcgtgttcttcacagcgcacactgagcaccgttgcagtcaatctaactgatgtttttcaaatgtaaaccaaaggcctcaagcagccacagtttatctcctgacttcctttttattgtcacaaggtgttctgtttagaaagaaaacaagccgttagaatattccaacagaaacagcattaacatgatttactaggtgggttatttagggttactcagccaagaaatggcatttctggacagtggtagatttgttcagcctctcacaaattgagggaagtggctttatttcttcccacccagctagttcccctgtcctcagcccagagattcaaatgccaacggctgccaagtttaccccaggaccgccaggcaaaggttccggaccactgtttgttttccatttctgtggcctcatcatgctcagaaatgctgacttctacgaagagcccagaaaagttcagatgtgtgccaaggctttggttgtaggcttggcacaaggagcagcagctggtaaggaccaggagacagcccggcctcctccatggtgcctgcctctcatagaagcagtcaggaggacaagcttttggtttccgcagacttagcagtcattcctgtgttcctaagaatcatactcgggattttaaaaattcatgtatttagttataactgtgaaatatcatagaaccgggaggtgatgtccaagtcatctggccagtccagtttctccttttgcacatcaaggatcaggccccaagaggccaagggattagtgggaacccttcttcttgccttcacatccatctctcagtctttgtttcctatcgcttacagttgtttttcacttctctcttcttttcctactccttaccatctgaagaactgaaaaaattattccaggttcagcaatgttggaaccaagttttgtaaacggacctaagccttttacaatctgggggaccttctttaggaaatggaacacagatgaccatgtatacatgttgctggcgcccctcctatggctttggaaggcacccaggcaggtgaggagccctgaatctcgagcttcctttagctttacagtgattcagtctctggttaggaccattacgatttctttctttatttcccccttacttatgccctatatgaaatgaaacagatgtgagtgtttgaatcaaaaagacttccctgatgtagtggtctcattttagatgctcagagcatagaataagtggcagcagaccttacttgttccatctggtttttgcatagactgctcgagttgtttttcctttctcatttgttttcctcccttgcattttggtctgtctgctccccaaacttttagctatgaaacatctctagaattcgacatctgtcagaggaggcagcggaagttctttctctgggatccatgagtcctgactcccctgatactgtgtgctgagagagggttttgttttcataattatgacaattcccatgtattgaatgcttcctacatgccagatatttccagagctctgtgtccctggaagagtcaagaaccactgtttatagcattgagaaggaaagagtctagcctctgacatcttttcttctaaaatgactgcaacacatggacatatttttagctattttttccatgaaatgtattttctaatgacttaagacattagatcaatgggaaaagagagcgtttatgtttttatgaaggtaatattttcagtggcaaaatgagctttatcagacctcaggaacttgtgacttccagaaaacaagaatggttctgacctgggatcgtgagaatgtctttatcctagacatgccaatccacacttagccagtgtgaagggaagagtctgcacttagccagcatgaagggaagagtggcagagaggggactatctgagtcctgtcacggcctgtcaggagagtgacaggtgagggtgggcaggaggtctccgaatgaactgctttgctggtaggctgtgtttctgtgtttagctgaggagagggcgggagagagacccaggctgggaggtgggggtgcctgagcctcctgtgccatttggagcatgtcattatgggggagtcacttattttgcaggggggaggggggtcccaggcctaacatttgtaaaattagggaatatgctgggactaagggttcgttgtggcctgcagtctgtttctatttatttattcatactcataaacatagatctctaatataggccaagattttgaaagaattagtagttgcaatttcaccttgtaagactttctcttttaggtaccttatattagttttacttgttagttacccagatatgtcaagcatagagctaaactgaatgcctgtgtatttgctgtaagcattgcctgccttaattcatgctgtgatgtggtgtggtttgcggaattcctagagtggccagtgcaccatgaccaccaactgacactaggctccttctagcaaagaccagggaatgtggtgatgcctttagttggtttataaaggactagcacccatgagcaggaaagggcacgacactcattttggcactgtgaccgccctcctggtcacaacgcctggtctccacactggcagggctgttcttttacaaggagggacacagggtttgagacaggtccagttgtcgctcatcgagaactcgtgaagacagacaggggagcagtgaccctggaaatcagctgggagagtccattcatccacgtagtgagaccgtgtctctgttgcggttcttatgtccacccacattctgtgattcattgtgtgttcttattagtatattataatctattagagggtatttttctctaattttctgtcattttgtagttctgtgcaaaaggcatgaaattgtggattaaaatgagggcatctggatattgctagaaaacaccagctgaattcacaggctcgcaaagaggtcgtatgtttggaaagctttagccattgctgtggttttctattttctggaggtggggacaggataggaggtggaccctagtccctagagactatttccaaagtgtgtttcccagttgggatcaattattgtttgttgacttggtctcaggattgggctgcgttctaactcgagaattgccaggcctcagggaagtgtctgcttttcagggaagtccgcccatcatctgccactaacacaagtcagagggccacggccatcaccagtgctgcaagtgggaagggcagagtggacttacataaacaccgtggcattcctgcctgcagctccggagctccaccctcatcgccactatctctccttggacttgaaccacaggcagatgaggccccaggaattagttgcacctgagagtctggaagtatagcccaaccctccatgtgtggaaggacagggtccagacccctcccgtcctgcttctgcagtggctgaatggctggaggccgccatgacacccctcatacacattcactcactcaccattcactcccactctcctgcccctgcccctttccaggctcccaactctctctctcatgtgtaccttgaaggtttgctagatgatatcatagtagacgctaacgaaatcgttgttaaataaacaatagagtgacatgtatacaatcaataagaccaaaaaaggtgtttaaaaaaatcttttatttttattttttaagagacaggcctcactccgttgtacaggctggagtgcagtggcacaatcactgttcactgcagccttgaactcctaggctcaaattatcctcctcccttagcctcccaagtagctgtgactacagctaccgtgtctggctaattgtgaaattttttggtaaagacagggtcttgctatgttgcccaggctgatcttgaacctctgggctcaaccgatctgaagtgcaaagattacaggagtgagccactgtgcctggcccccaaaaaggattttaatgttaggagctgagttatctgagcagacacagtccactgtctggtcccaaggctccatgtagaattgtctgcttttagcacacaggcccacctgggctggcctgaggaggaaattcaggagtgggagatgccatcttttcctagccaggaggggctgcagagcgtgtgggctgagactcttggggagggggtgtgaggggcagtcacatggcctcatgtgaaattctccataaagaatcccaggcagaaggccatggacaggcaggctggtgcaccgcatgtgtgaagatgagcagcagggacaacgggtgggtggggggagggagtgggggagggagcgggaggactagagggagtgggaggactagggaaagtggaagagggagtggggggagagtggggaaagagtgggggagggagtggggacggagtggggggactgggggaagtgggagagggagtggagggagagtgggggagggagtggagggagagtgggggagggaggagggagggagtgggggagggagagtgggggagggagtaggggggtaatagggggacagtcgggggagagtcggggagggagtgggggaggaaataggggggtaatgggggaagagccgggggagagtcggggagggagtgggggagggagtggtggagggattgggggagggaatagcggggtaatggggggagagtcgggggagagtcggggagggagtgggggtgtcggaggatgtctgatatattcactccttcctttaatgatttcaaatgaagtgctttttttaaaaggcaggctcaccaatgaggtgcgggaagtccccgcagagagagagcccacgtagtaagtaaggaacgggggcggttagagattctggagaggccggatggaaaatgcacacacggtgagcagaaaccatgatcctgagacgctgatgtccaggagggagcctcagagcaggaacgcagccgcggcagggggcggtgggagtctgcggtatgacgtagggtacgaagggcctgggggtggcagagcagagcctgctgcggaggcacaggcttctcattccgcgcgagtgaccgagacatggatcgcgctcttgccggaggagggtgcacgtgcggaccagaggcttcccagcgccacggtgccaagttgtgggggtgctgagccaggagcttcagaagagcctcacaagcagggcacaagctgagaaaaatgacagctcacgacactctttcttcatatttaaaccagaggaccaaacaactcaaggtgctcttaagaaaagcccgcagtcgtccaagactttaaatgaaaacgcggatctgaaaatgggtgaaggaaatttgaggtacccacatttgccagaacatcgcgtccaccctgaagtaaggtgctacctgtggtggacacctttgtgacacttcgtctctaagtgagataggatttccagggagcgtgggactgtccctggattggtggctgctgaggaaggatttattttccatggagctctagttggctgtgagattttaggtcaacaactggctacagatgatagatggagagatagcccctgtacaatattcactgtggactattattatatagtgcatagtaataagacaatgtacaaaatgtgatagcgtacacttctttcgtatgtagaaaatgcagggatttttaaaaagtgagatttactttggtctgaagtcctcatcaggaggccaggcgtggtggctcaggcctgtaatcccagcactttgggaggcgaggtgggcagatcacttgaggtcaggagttcgagactagcctggccaacatggcaaaaccccatctctactataaatacaaaaatcagccgggcgtggtggtgggtgcctgtagtctcagctagtcgggaggctgaggcaggagaatcacttgaatgcaggaaatagagattgcagtgagccaagatggcaccactgcattccagctggggcgacagaacaagactctgtctcgaaataaataaatagcaataaaaaatgaagtcctcatcaggaaatgcagtaagcagatggttatgaactggattacgctgctgcagaccgtcttctaagaccatttgtgtatcagtggttggaggagtgtgtaggccaacctctctttgaactgttgtaaattcattcaggcagatgactaaaaatgacataacccccacccgtctcccaagggggcaggtgagaggtgggtatagcatttcaggtcagaatgggggttctcacaattcatcagtgttcgctccccaaatctggatttacagtctgaaatgttctttctttagcctctgaatgccagaagtaagcacttccttttaatttttatttttccctagcaaattctttagtgagcaagcttttgtctgatctaacctttctctcccctgttggtttcagcctccacctttgtcttgcctttccccccaccacttactcccacccccactgctgacatgttgtgagtcgtctcctggaagccacagccctgctggttttcactcagggtggtgggtcccttatgtgtgtcatgctttgcacaagacagcgaggagtgctggctggtttgctggcgcccagcactatgacctggcttccgttcatggctcataagtttccagtctttggggtatctgtggcttttatgtcatctcactgcctctcctcggcacagggactggctttgctgtcgatggcagacttaaggcaagtgcagaagggaagaggactgctcagaaacatctcctggagacactgtattttcaatgggtctctccaaatccagcagaaaaagggcaaaatgtagggaaggggtgccaacatgaagccatcatggtggtgccaaggatttattgggcagcaagaatcaaaggactggtgggaaagaagaaatcagagtcagcatgcaggagaaaagcagaacggagacagtgtggctggattgatagaatactggaaggcccaacagatagtcccacacccatgttcacagcacattagccacgattagccaaaagagggaagcaacaccagggcctgtcaccgtataaatggataaacgagatgtggtctctacatacaatagaatgttgtttcagccgtaaaaaggaatgaaattcggacacacgctacagcctggatgaaccttgaagacatgatgttaagtcgaatcagccacagtcacaaaagcgcaaatactgtgtgacgccacttaggtgaggcacctagagcagtgaaattcatagagacaaaccagacgaagtagagtggtggtttccaggggctggcgggagaatgggcagtgagtgtttagtgggtgcggagtttcagtttgggaagatgcagagcgttctggaggtgggcggtggtgacggttacacagtcatgtgaatgtacttaatgccatggaactgtacacttaaaaatgattaaaatggtaaatttatgttacatttttacacacacgtgtgtgtgcacatgcttgtaactctccattttttatcttttgatcctaaccttgaacctctccagagccttaacttaaatatctcctcaggccgggtgtggtggctcatacctgtaatcccagcacttcgggaggccgatgccagcggatcacttggggtcaggagtttgagaccagcctggccaacatgctgaaaccccatctctactaaaaatacaaaaattagccaggcatggtggtgggcgcctgtaatgccagctactcgggaggctgaggcacgagaattgcttgaacttgggaggcggaggttgcagtgagctgagatccgcaccactgcactccagcctgggcgacggagtgagactccgtgtcaaaaaaaaaaaaatctcctctacgagtggatgtcgggtgaggtgggctggggtgggcgatttatttggggcttagaaggaagcagaaaagttcagtcatcttctgttacccatacagcaaggtacaagaaacaatgtgtgtgggagcagcaatggcctctctctctttttatttttcagaggaagtggtggtaattccttttagtgtcttgcattctacatgcagctttaaaatctacactgacatgtttcaagcaatctcataggtggctactaacttaatttgtgttttgctcattcctaatgcgcaggaatgttatgaaaatgttcgttcctggtgttaactaactctgttcagtccttgtatcctggttgattaatggcaaggtaattgcccttcatttctttgccttcaaagcagtgccacctaggtctttactgccctcaaaacagatgtcttctgcaaagagtgaaattccgatcagtcagtccctcctcataaaacatgtaggtgagaggccacttggatgcacaggaaggttgcaaagccagctgccctgcaggagccttcagaagagtgacctccatctggggtcagaccccggctccctggagggtcagcagaggagaaggggcatcttctggagaggagtatgggtgcggggcagacaaaggaacagaaacagaaacaatcaagaatgaggagtgagcctgcagtgcaccttagagtgtgtgtctattttctgccaagggtgagatgttctgagcattttctctatgtctacctccgtcaagtactttccataactgctgtcatgtcagcctcctactaaccctgtacagtaggtatgactgccgttccattttcatagatgagaccgaagggtaaagagggtagataactggaccgagtctacacatgtattaggtgtcggagttgggatttgaacccaggtctcatgaccttaagttgggcgagaactggatgtaatctggagtggccagcatgttccgctggggctgtgatttcagttatctgtaagaaagcatgaggcagctaaaaccactgaggcccagcaccagtgcagcatctctgatttccttttgccctgcttgtgtctggggacttcagactgtctgtctgctctctggattctgtggtccaactggcacttctgtgctaaaaatgaaggcataattgaggcatcacggaccccagatgggccctgcagcctggggcaaggctcagctgacctcatggcacccgtctcagtctaatccagtcttggattgccacttcccctttttggctttgccttgtcctcccctggcctggcatcccaggctcctgcttgtggtttacctgtgtgacacacacagacacatatacgcactctagtgccaaacatgacagaccaggaggttggttttcttagcctgagaatctgcatcatctgaatgaggtagaatctggaggagtctggactgtgagggaggaagcttgggaaggagtcaggatgggatgtgctgcccatcaacgcctgcagggaaagaagagtcccacgcagggaaaggagagtcccacgcgggaaaaggagagtgccacgcggggaaaggagagtcccacgaggggaaaggagagtcccacgaggggaaaggggggtcccacgcggggaaagaagggtcccacgcggggaaagaagggtcccacgtggggaaagaagagtcccacgaggggaaaggagggtcccacgcagggagagtcccacgcagggaaaggagagtcccacgcagggaaaggaaggtcccacgcagggaaagaagagccccacgcggagaaggaggagtcccacgaagggaaaggagggtcccacgaagggaaaggagggtcccacgcagggaaagaagagtcccacgcggggagagccccatgcagggaaagagggtcccacgcagggaaaggagagtcccacgcagggaaaggagggtcccacgcagggaaaggagagtcccacgcagggagagtcccacgcagggaaaggagggtcccacgcagggaaaggagagtcccacgcagggaaaggagggtcccacgcagggaaaggagggtcccacgcagggaaagaagagtcccacgcagggagagtcccatgcagggaaagaaggtcccacgcagggaaaggagagtcccacgcagggattgctgttccactctgcatagccgctgggctttctgctgcacggatgccatctagaagaagcaccatccactgttctcagaaagaagagagaggaaggagacaggagtgcgtagagtgagtgggccatcagaaaaaggactgctctggggatgcaggagacccgcttgtaggatttaggggcaccgtgcaagacaggggtcatggtatgcgggtgcctccgactggcggctgcgtggtggatctggccacttggtgaaggtcgcagtgaccttgatctgctctggggagggatgctgttttgcctttcttcacgcacgtggaatcaggactagctggactggcaggaaaaggttctctctggaataatggtttgcttctctgcaggctcgtgcggcggctcgtgcggagccctgtgagcactcattcttgggagagcacctgaagccgcctccaggtttagtcatttcctgctttttcctatacataccttccgtatcaacatgctttttgaccttcctcacctgaatacatctgataccctatgaattcttacctttctttttccaaagtggccaggaactgaaaatgcaacttcattaaactggaaagactggctctttgctaattagtccatttgaaatgaaactaggctaggatttttggttcacctcccagatcacaggaatgtattgcctcattaacagttgaagaagcagttttaaatgatccaagaacaagctgaccacttggattcctgggtagtcggctgggcctcctgtctttctgcaggtttgtgacttacctttgcttccatgggaagaaaggaggcgggaaatgaggtacaaagagaaaattggagtgagtgggcattttggtttatcaagtagaagcaattctgtgtgtatgtttgggaggatgtggagagcatttagaagttttatttatttatttatttatttatttatttatttatttatctatttatttatttttgagaaagtcttgccctgtcacccaggctggagtacagtagtgtgatctcggctcactgcaacctctacctcctgggttcaagtgatcctcctgcttcagcctcccaagtagctgggattacaggcacccccaaccatacctggctaatttttgtattttaagtaggggtggcgggggtcgggggttcaccacattggccaggctggtctcgaactcctgacttcaagtgatccatccacctcggcctcccaaagtgctgggattacatgtgtgagccaccacgcctggccattcatttagcctggtgacctagaagtacttaggaaatgtgtgtgtgtgtgtgtgtgtgtgtgtgtgtgtgtgtgcacccgtgtatgagtatatgtgttttggttttccaatctttggttcacgaatgtagtccatattcttagaactgactcacatataggaattcaataaatatttattgaattaataaataaatgactatggtgtgtgtgtttataggtgcacacacaaacacacacacagagtaacatctcacccataagtcatttatcgagcaaccataagtatttaaaataaatgacaaattagaaagtccagaagaccatgcagtggctgcataaaggtgacaaagctcatgcttgtgtttctttaaaagaaacttatcacccttcgcagccaggtctcctttagatagcgtgcttggccgggagcagatcagaaatggcaaactaaagataaagacaatcacaaaggcaaaaccaacaaagcgacagctaacagcttgacaggaagagaggggacagaaagcagacacagagtctctaagcacagccgtctggtttggggcaaacaactttttgcactttaccgtgcctgtggaaactatgtcatgcggcatggaatgaaattaattaacattcgtagtagacgctgaatcatcaaaagcttgaattatatctcataactttgtaggaagatgaagttactctagcaagattccttcaaaatggtttacttgtttcttaaagagtacaggcttccattatgtacaccaggaggcagaaaactgtggtcagcagaccaaagccagcctgctgcttgtttttgtaaataaagttttattggaaacaaccatgctcattcatttacgtgtttctgatggcaacttcctccttcccctcagcagaactgagtagttgagacagaaaccatatggcctgcagagccaaaaatacttaatggttatttatagcagaagtttgccagtccccaatccagatgttgggttcctcttgaatgttggtttgtgcttatgtatacatctgattcacttgcacgcattaccaagtgatccatatacacgagtgtgaacacatacgcatttctgtgtggtagtaagcacaactaagtgtgagcaccacattctcagacatagctctagaagagagtttctaagaaattagctctgagtcttttctgcttcagtcagctgatggcatggagcagtatgttgtaacctctgacccgaagggcaaaggccttctggaggaagtgtacacccctcagaagcctccctgtacattcaccatccccaaaatagctccttgagtagaggtgcatcgatcacccccaaagcttacataagatcctagcagtcagaaggattcagtgattaggtatcccagactacatagggtcttgtgggatatttcattggtactagaagttgactgcaatggcaagaaaggtatgcttcatagggtagaattttgcttttagggttttttttttttttgagacgtaatctcgctctgtccaggttggagtgcagtagtgctatctcggctcactgccacctccgtgtcctgggttcaagtgattctcctgcctcagcctcctgagtagctaggattacaggcctgtgccaccacgcctggctaatttttttgtatttttagtagagacggggtttcaccatgttggtcaggctggtctcgagctccttacctcgtgatccacctgcctcagcctcccaaagtgctggaattacaggcatgagccaccgcacccggccttttaggctattcttgtggcctttgtcactgacttaatggataaagtttcttctgctaaggcggccatgttggtttattattctgtacggatgtggctgataccacattagtgtgagctttcactagtgctcactttgatagcctccttgcacagcctagctaatatatgtcactggactccattaattttatagtgtcagtagcccagaactcattaaggaagacaagtttctgagattgtagattcctatgggtaaaatatgtatattatcataaaataggtactaaaacgtgatttggatttgggatgtggaagtaagtgccattttattattgagatattcatataccataaaattgacgttttaaagtaatttttagtatagtcacaaaatcatgaatatatattttcaccttgttttaaatataagaagattggttcattttgaagaattctgtgtgacccatatcaaagtagctgttgcagttgtgtagagattcacacatgtatgctctgtcaagatttaccagttggcatgtgtgccataggatttactgagtgtggattatgacagtcctaggtcccttgattttattttatatacatatcaaattgctcttccccattgggccgtgttggagaacaccagggcccagggcccaagcctctagcctaccccaggcccaggggtttgaacaacctccctaccttctggaaacccatttccccccaatactggctggaaggtatgaggagtcgtctttcttactgtccttatcactacaggaaacagggaaagcataagaaaaatgacaaaatgttccagctgagctagagtctcattggagggtacaattgtctctgagtatcagtggaagagtgcctccaggactcctacagaaactaaaatccacaaatgctcaagtccctggtataaaatgtcatggtatttgcgtataacccaggtacgtcctccggtatatctgaaatgatgcctagattacctataatacctaatacaatataaatgctatataaatagttgttattctgtattgtttgaggaataatgacaaggaaaaaaactctgtacgtgttaagtacagacgcaaccatccttttttttttttctgaatacttttaatccatggttgtttgaatccataaatgtggaacccacggatacagatggctgagtatgtactaacatataaatagggctagccttgcttttctgcagcccctgtccctaacatcttattctaagtggccctgggcaaagtgaccattcatttattcactcattcatttgtaggccctactgagagcctacgatgtatacggcaccatgtaccaggccctgagaacacagaggtaagatagacagggtcctgctttcatcgggtttatattccaatgaagataagaggcattcaacaactctttatctaatgagttgtacagcaacccttgtgatatgtgcacttaaagaaatgtgcaggggttttggatagaaaggctcaatgtggagacagacttggtctggaggcggggcagcttctctgagggtgcgacgtttcagccacgatctaagggagggaacagggaaatgcactgcggtcatccaggtgagaaatgatggtggcctcagtgcccaaagtggggacgtcagtggatgcagacagtggatttgagacgtatttaggagatggaattgactagcatcattttattgacacttttcatttctacagtttgagtccatcctcccatcctcctttcccaatcccagtgcctcagatgttctcgtttttcccttggggtgagtctatactgaagccagatggtttcactcaaacccattcagtgctccagagtcaagtgctggtcatcgcaggggagctccggagctgcgtctgtaatgttagtgaccctgatttctaaagggaagtcttcttcagtctgtttctgagattattcctgggagctttaactggaaaagccaagggcttaaaaagatgcagtttttttttttttttttttttttttttttttttttgagacactgtcttgctttgtcacccaggctagcctgcagtggcacagtatggctcaccacagcctcaacctcccagattccagagatcctcccatttcagcctccagagtagctgtggctacaggcacacaccaccactctcagctaattttttaaaaatttttgtagagacaagatctcactaggttgcccgggctggtctcaaactcctgggctcaagtgatcctccccccttggcgtcccaaagtgctgggattccaggagtgagccactgggcccagcacggtgcagtcttcagagaaggtgaactctctgggcacctagagaaacttgtagggaaacaaaagcttgtttataaacttggttcaacacaggagactatgttctccacattgaaaagttccttcatcttttttaaagcatctaaatgatctgtgtctcacttcctaagcaggctggtgggcagggagggtcaccagttggggcagagctcagagggaggtgcacagctgtgcagtgtctaagctcctgcgtctcctgtcacttggttcccgtggcaccatctacgcccatctccctcccccttaagggttagcatgacattgtatcacagggatgttgattttcttttcacttcagttctggattttcaaattctcagaccacataccaagttgaaagcaatcctttgtttcctcttgaaccgtaaaccagaaattgtgcttgggaaaccataccaggtgactaactggaaaacatccccaaaccttgttagtctttggccgtagacatttaattctgagccctggatggatggtgatattaaatacagattgtgcgcacattagtagtagaatgtacccctgaccaatttttcacacatttaaccaagtaaatggcttcttgccttcagtgagtttttatttcaagaccagcaaccattgcaccaagatgaagaagtgagccgcgtggttttctccatccaggggtgcagaaagaaaagtgcagagacagtcttcagtgtttttatataaattcacttttgcaaaaagtatgttgctgtgtaattaagagtgttaatgatgctgcctaaagcatctagggagagcagtctggacaaggagagaatgggaccgtcacccaccggtggctcctccgtctatggcctctagtcattttgctccctacctttcttctgaagtcaattctggtttttgtttttgtttttgttttttccctatttttcccaaagacccggggctggaggcctgtaaagggaccatgctacaatttctgagcaatccagtctggtttaccagaattagaactcagtactgcagaaccctgggaggtgatgatgcaggtcaatgaggccttggcaagaagaaggggagggagggaggatggagacgtcaacctgacataggatttggagaagagtcagagattaagaatttagattaatgtgccaggcgccgtggctcatgcctgtaatcccaacactttgggaggctaaggtggcagatcgcctgaggtcaggagttcaagaccagcctggccaacatggtgaaaccccgtctctgctaaaaatacaaaaattagccgagtgtggtggtgggcgcctgtaattccagctacttgggaggctgaggcaggagaattgctttaagctgggaggcggagcttgcagtgagccgagatcacaccactgcactccagcctgggcaacagagcgagactccatctcaaaaaaaaaaaaaaagaatttagattagtgtttattttggaaagggagagccataaatatatatttcaggtgtctgtcttcactataagtttgtttatggttgaatttgataaatgacttcctttggtctgtggagtgtattagttatttgggtgtgatgtgttggaagaagatagttaatgcatttacaggaggatcatgtgagatttcagatcagggccacctcatgcctttaatacataaaaaccatttaaaacattaaaaagttccatgcaatcttttttttttttcctaccacaatttatgtctttatgaggaatatctccattctgcctctgctctgccagggtaattattatcctgtatacactcaggtctgtgttcaaatcagcataacgaaggctgctatgaaaatgaatatagaattttcataaagttcatgctaaattcttaaactttagcttttacatttttggcagtaggttataggtaggagtcatctttgtaattgacatttaaacgcaatttttcttctcataattgataacgacttcattcgtgccagccgcaaaacccagtgtattattcttgtcagtgcttgacggttttgacaggccagaaaaattgcaagtaaaatagatatatttgggcgtgagatgttgacttataattcatgaagctgcaaccttccacctgtaaaggagaagaattggcagaggtatggttttgatttatgtgttgaaagacagaaaacaaataagaaaacctttgttctgctgtcacaactgatgaaggtaacagtgttaaaaaataatgaaattcacaatacttcctacacatccagtcctctgtagctgcaattcgggggggccaagggcttccttagcagaatctctgggctttcttggggtgcaggtagggctctggccttgctatgctttaactagaactactgtgattttttttccttccttccctccttcctccctgcctcgctgcctccctccctccctcttttctttctttccttctcttttttcctttctttctctccctgtttctctgtctctccttccccctccctgtctccctccctatctctttctttccttttcttttttctctccctgtttctctgtctctcctcccttcctccctctctcctttctttatttttcttccatctcttaatttcattcattcattagccttctgtgtaagattttgtttggaaaaaaaagagtcatatccccctttaaaaacagttcatagaaatgtatcctctagtagtcccagctgctcgggaggctgaggcaggagagtggcgtgaacccggagggcggagcctgcagtgagccgagatcgcgccactgcactccagcctgggtgactgagctagactccgtctcaaaaaaaaaaaaaaaaaaaaaaaaaaaggaaatgtatcctgtacatgaatgtggataatgagctttcctggctggaaaagggcaatcactctggcttctgggatgaccctggagtccttctctgcttcagtaattgccacactcctgggctccgccacttctctattgcccagttcttctgctgggatgctggccttccgccaggcagccttaggttctgcttagacgcacagataatctttaccagtgtgtgagaagcctgaggatacagacagactgcataccgcggccatgtgttgtgtgagtggtatcaggctggacgtatcccttgacaacttgactttttagctcacagttacatttttcggactgatctacgttgattcgtggaaaaacaggtgataccgcttctttccttctatcccccggcttcagttgagttcattctataccccacccgatgcctccgcgtacacactgtagctaattctgcaggagatggagggttccatggtatcttcacacgtggagatggcactacattcgtattctgagctattccccagcagcaagggtaaattttcttctcttgcattctctcgctcagtcaaccttgtgaccattgactcatatttgaatgtcatgtttgggccataggcgcaagtgaggagatgctcacgctggttaccttgcaggtgttttctataatgaagagcccacaagccctcaccccacccctgccctacccgcagctggagtgaaggtggcgccccagaggccactcctgggagaaacctcatcccctccctccttctgcgacttcacagcctcacacacagttgtctgggaaacatcagatctaaccacctcgagccttgcgtctctgtttatgcctctcccaacaggaagctgagactcggaaaatcctcgtccccctccgcacctctctcctactcaccacgcctttccacgggaacacacagcacgttatcagcaaaattccccacaccctcagcgcctttcctgagaggtcctcgtgatggtgtggatctgtgtccctgcccacatctcatgttcagttgtgatcccagcgtgggaggtggggcctggtgggaggtggctggatctcgggggtggtttctcacgaatggctaagcaccgttccccttgctgctgttctcgtgatagtgagtgagttctcgtgagatctggttgtttacaagtgtgtggcgcctccttccttgctctttcttgctcctgctttcacggtgtaaactgcctgctcccactttgccttctgccgcgattggaagctgcctgaggcctccccagaagcagatgccaccatgcttcctggacagcctgtagaaccgtgcgccagtgaaacctctcttcttgtaaattccccagtctcaggtatttctttttctttctttctttctttttttttttttttgagacagagttttaccctgtttcccaggctgaagtgcagtggcatgatctcggctcactgcaacttctgccccctgggttcaagcgattctcctgcctcagcctcccgagtagccgggattacaggcacctgccaccacacctggctaatttttttttgtgtgtgtgtatttttagtagagtcagggtttcaccatcttggccaggctggtcttgaactcctgacctcgtgatccacctgcctcggcctcccaaagtgctgggataacaggcgtgagccaccgcacctggccctcaggtatttttttatagcaatgcaagaacagactaatacagtccctttaccttatcttcctaactgctccccgaagtcctctcaagccacatctgctttgtccccacaccctgaaccaccacgtttggtgctagcgcctcatcactgctccatgatcatccttccctcctcctggagacccctggctttgcatctctggccaccagatcattgttgcagtcatctattcatctctgatccatgccaccttgttccttgtggattgacgctcctggagtgctatcagtacaccaaccctacttgtcagacagtaacacctgtgatttcagtgttcttgtagacaatccttcggtactctggcttctcaggtccttaatctcctcttctccgatgaccttgttcttcactcaacctcagccccccatttccgtaactataccctagagcttattaccggttgtaaagactgataatgcagtcattatctgttatgctccagctccatcatctcatttcaagcatcccattctctgatcaccacctctttcttctctcctaaaaccttgactgaaaacaattcttccacctcactgaagtgcaaaatccatccatcctatcatcttttccccctttctcacctacctcatgtcttcatgtctctcattgtctagtttggagtccttgattatctaatcattaccttgctttactatcttataacattaacttctttacccatctctctcttcatcccactctccttgcaaaactacagccttggtaaaatccagttgcccatgtcctctgtacctgtctgtgcccagctgagcctgggtggaacagaacacagccgtggtgactgtttccagtttatgaccattaacttctagtgggctcgagcaccctctggcagagcgttctcctctttctgtatcatcatttcttctctcttgattgaatcactccttttagcatacaaaaatgctattataactcccaacttaaaaaataaatttctcttaacctcacacatctcattaactactgtcccctttcttttctttctttctttctttctttttttttagagacagggtcttacctgtcacccaggctggagcgtagtggcgtaaccacagctcactgtagccctgtagccttgaactcctgggctcaagtcatcctccttcatcagcctccaaagtagctggtattacaggtgcatgctaccatacccggctaatttttaaattttttttgagagatggggtcttgctacattttccaggctggtcttgaactcccgggctcaagcaatcctcctgtctccccctaaacggatagcaggcgtgagccactgcacttggcctgttccatttctttgattatctttgcagcaaatttatttttaaaatgcgtgtttatactctctgtttccagtttctcatctctatcctctcttgaacccactccatttatcttttagctgccaccactcaatcaaaagctcttatgaaggtcactgatgataatcaagactaaataacatttgtaatagataataattgtaatctgatcattataacacgttcattcattctacaaatatttgttgactggcacctactatgtgccagttactgttctaagtgttttacgtgtattcacttgcttaagccctaaggcgggtaccgttattttccccatgttatgggtgaggaaactgagaaacagagaggttgaagaatttaccttctatgccataagtggtataaaatggtcagttctcagtcctcattttacttgatctatctgcagcatttgcccgtagatcattccctccttcctggatgactttctttgccttgttttctgaacatcactttttgatttctcctttgagctcactacctattccttctcaataccttgtgctggtttcctctcatctgctctaaataaatcgtggaatgatcattcatcagacctttgctctgcctgcactgactccctatgccatccctcccaggcccgtaacttccaatgctatcagtatattattgatttgcaaaattgtatccctagcctggaccttgaccctgaacttgagactgttggtcttagtctgctcaggctgatataaaaaaacaccacagtctgggtggcttataaacgacagaaatgtatgtatttcttacagttctggagactgggaagtccaagaccaaggcaccagcaacttgagtgtctgaggagggccctcttgttcatagatggcacattattgtgttttcacacagtggagggggcgaggaagctctctgggtcccctttctaagagcactaatgtcattcctaatgactccaccctcatgacctgatcaccttccaaaggctttacctccagccatcatgttggggactaggtttcaatatatgaattctgtggggcaacaccacgttcagtttacagcggtctctctggcctcatgtccaaccatctcccctcctcattcatcccactccagccacgccggcctcttgctgttcccagttacgccaactcgcccccacccagtccttcatgtctgcctgctcccctgcctgggtcgcttccccacgatgcctgctgtggctcacagcctcactgccttccggtctctgctccagtgtccctgaatagagtccaactctgagcatgctgtggaaaagggcctcattccaatacacaaagtcccttttcccatgccctgccttactgttctccataggtcacatgtgacgtgacctgtgtgtgcttgtttactggttttgcttcagaagagacctccgtgagagcagggaccttggtttgttcatggctctatcgcacaactgggtataataggtgctcgataaatattctgttgaatgaatcaatgaagttgccacagggaaggcatagacatatgtctttcaaaactccatgtgcttggtctttttaaaagtaaatttctttgattgtaaatagattcacattgatacttgaataaaatcataaaggtatgtcttctttcctcttcctttaagttttaagacacttataaatgtacctgaaattgtaataaaagatcccagaggattttacagcatgttttccgttgatggtaatggatggaaataatttaaataataacattaacaggttgttttactacaggaccacaataattttaaaagacaaacttgaataatcctgttttaccacatccctaaacctatgaaacacacagtactcactcattaatgttgatttgtttaagagaaataaacttcaaaaaaaaaaaaaaaaaaaagccaacaaaactcactctgatattaactgcctcgggtttaaaggttttttcagaatgcctcagtaatactggcttaatgaattaggttctaagaaaaatggccaggcatagttaacaataaatcaggttatactatttgcagaaaaagcaactaaaactctccttgtaaataataatgtggaaagatctggtattaatcaagccactgtctacagctgagctctgttttcagcttctgaacacagtggagttaatattgagcatatctttgtttcaagtataatgaacacaattctgcagtcctttgagaacaggcttttgtgaaaaatcagtaaggaattgcacctaaaacccatttacaagatcatactcccaaaggctttgtcttagagcagtttttaaaatcttgttggtaacctcctgaccacatcattgggagtacaaaaaagtgcagagagtatatatatatatatttttttttcataaatacttgcacatcacatttcccctacggaaattcaaccagcggttccaaagactgctgggctggagttgtccgggttggtggacccgcctgagtctggggtagcttagcttgttcagaggtgtgcacagggctgaggaccttctgtgcgtagcagagtcattcatctggtcaatggccacatgaagacacagatcttgccatatcagattctccttctttctactggaggtctggtgactttacctgtgttagttcaggcacctctggataacttaaggactcaccaagcggcaggtccttatgtagctccacagaccaccatgaaacccttcgaccttttctgaagtctgccttacgtcttgggccactgaacattctgccagtcctgaagaacgtgttgattccagtctcatcccagtgcaaagtgtccttctcatctttgggctgctgtcccctgagcaggaatgccgtccccacagctgatctttgaccatgggtagactctggtctaccatatgacctgggaccatcaaagcccaggttaagctgcatcccaagtgtttttctagccagccatgccctgggggtactttccattttattggtcacggagcactcaggccctgctccaggatcccaggtatggtctctggggaaaactgaccacaggttgtgcaggaggaaccaccagacctgcccgagaggggacatctcttctctttggtctgctgctttgagacaattccaagatcgcagtgtatatatgtgtgaagtcttcatgggtaactatctccaaagcatttaatgattctctttccttggcttataagtaggctgataatggaagttcaaatgatgtgggactctgttggtttgtccttctggaaaatcccactcctcttcctggtcaccaaagcagtgaggggaggagggcaaggaattgactcctcacatgtattctaacaagcatggaacagagcacacaagacatggatcttactgtagaccggggaagacactgagccacttctggctttatctcttctgacctatgcattgggataaacttagctgagcgcgtttccctgtccgcatggagggtctggaaaatgagccggacattgagctgggcttcatactttcatctttgcctctctctagagccaaacaaaggcttacctgggtgggccctttttggtcctgtttttctgtcatcgctgttgatacgtgggccttgagctccctagttgcaaactgggaagtgcattgaatgagaagtgtgtggcttcttccctggctatgccttttcacgtgttaaacatagggaaaactcagctatgccttttcatgtcttaaacaaagagaaaactcagctatgccttttcccgtcttaaacatagggaaaactcagctatgccttttcacgtgttaaacatagggaaaactcagcatttgtaataacatgttatgtttatagagctcttcacaaagtgctttgatgtctgtgattccatttaatctttacatcagcagcaggggataagtgttatcccagtcttactgatgaggaaaccaaggctcaagaagattgaatgatttggccaaggctgtgacactagaaaaggcaaagcttggactaaaacccaggtcttcagaattcaggtccagagctctggccagtctgttgactccttcatcagctcccaagatgaagatgaggagctattttctgttttgagcctttgattacagcttgttttgtaatacaccataaaggttgagaccatgtttgtttctagcacttacaaaaagacctggcccaattagacacttaataagtgttttataaatgaatgaaattagtgagtgaagaggtaaatgaatggatatattgaatgaatagattaactaggcaaaaacctacctgtctgcatttatattggaaagcactacatgaaaaaatgagatttgaaagttttagaatgtggctgtgtgtgtgagagagatcgtccctcaatctttcatttcttctgattgtctatcagtagggaaggtccaagtcccacccatactgtgtttctcaaatattctcaaattgtattgaaacctgtaaccaaaaccaaagttaaaattgattttaaagtgtcttctaggtttttattctaccattcctacctccagttttttgtttgtttgtttgtttgtgttcctttttgagacagagtctcattccttcactcagactggagggcaatggtgcgatctcagctcactgcaacctccgcctcccaggctcaagcaattctcctgcctcagcctcctgagtagctgggattacaggcacccaccaccacacctggctaatttttgtattttcagtagagatgggttttcacaatgttggccaggttggtctcaaactcctaactgaaagtaatccatcaaccttggcctcgccaagtgctgagattataggcgtgaaccactgtgcctggcccacctacttccagtttaaagtcacctgggaaatacttggagtacagttttgtcattttaatccttttttggaccacaacaatcactttacgaacatttttttaactttttcagaatcgattcaaggaaaagtgatagaggcaggtggggacggggaggtgagttttcttcgcatttttgggaatctcaactcctgagcctgtcttactagtacgggttccccaaccccacgactagaactatcttagtggtttcttcctaaagagatgtacacgtgtgtgtgtgtgtgtgtgtggtgggcgtgggtgggtgtgtagagtagggaaaaggtgagaagtggctctcttgctatagacttttgctttttactcttttccactgagtctgctcatattattcatacgattatcacgttagaggttttggagttgtagtggctatcgttttaagtttcttgtagaattaatttatataagtagacaatgtatatgaattgattgattcaaatctgtatcttacaggatctgttaaagatagtcagaaggctgtcttttaaaatgtgaggacaaatcagtttaacagtatagcagagaagtacagctgtgctctgtcaaactctaggctcctgtgtgttggaatgactagaggcagcagggagaggggtcctggtttactcaccccctctccctctttcacatactagcttgggcttgttgtggttgaggtggtgtgggaacatctagaaggttcattcaaaaaagacagcctcagcctttgctcagacgctcaagatgttctgccggctctccctaccatgaaagttctctgagaagccagtaaagatggcagcctctaaagaggttagctttatttggtggaggggcggtaggggtggcacacaccgaggaagattcggatcgtggcacatccttgtggtcaggcccagaaatcctcattgccctgcagccacccaggtcatgattcatgaggtgggggtctaagctgagaatggctggccggttctctgacttcgtgggtgtgtaatagttggttgcaactgacttctcaagaatgacagttactgactggagctggcagagaggtgtggccaagttcctggagaaatgcttcctgctcctcccgccctccccaccaccatcctgctgtatttaaagctgctttggtgatgctttgctcatctcagtgaattttcagttcagaccttttcactaaggatcattatggaagaaagaggggtaagaagtgtggctgagtagcctaggattaattcatcagtccccaaataagcaaacacgatgtctcaggatggacggtgaaattctggacctcacaggtaggtcttggagttgttagttgtgaatgtagacccccaagttcagatgttgccaggattttacatcctctgcttaaggctgtgttgttatttctgatgtttatgagtgaaaacaaaaacatacagctcaggtccttatcctctgagggtctcctcagcctggggcacctcccgccaaacgcttcatgactcccccaccaagcacatcctggcacaatctggcatgaggtctgagctacataaatgtggttttatgagggaacaaagcaagttttggttttctttagaattgtacgaaattataccttcaagatgactttgccttatcgtggcttttgttttgcttctccgagaaggaaactacaaagttaccatgatgtaaatccggccagaggcttgaagtgatttcatagtaaaagccacctcagccgtcccctctgaaacccaggccaagaggcagagatgccaatgacaggctctgtgaccagcctcgtaagccatgaaccagatccacggtttcacatggccaggacctcagggccgcatcagcctcttccaccacactctctcgtgaacagctggtgacactgtcagcggcgcctctgtcacaaggaagggcaatgtcctgtgtagccagatggcgggggagttggaggctgggccaggcggtcaggatctgcattccaccagcccgtggggttttcatagccaggggcactgtgtccaccttgggcgtggccatacacagccaccacttctaaccccattgccagctacaacggaagagagcatgctgtttagagttcagtacctccacataagggaaactgaggtagaggagagccggcattagcttctgggcttagaacacccaccttgccctcctgcatcgagattcatctccagtgagagcaggtgagaaggaatcagaggagagcacctaggcccgggtgtcaaccttgaccccacggacatctaggactggatgatttttattttattttatttatttatttatttttgagacggagtctcgctctgtcacccaggctagagtgcactggcgcgatctcggctcgctgcaacctatgcctttcaggttcaagcgatcctcctgcctcagcctcctgagtggctggggctacaggcacccaccaccacacctggctaattttttgtattttgtttagtagagacagggtctcaccatgttggccaggctggtctcgaactcctgacctcaggtggtccgcccatctcggcctcccaaagtgctgggattacaggcgtgagccactgcgcccggccagtgattcttttttcaggtgctgggatgcggggtgctgctctgtacagtgtatgatgtctagctgcatccctggcctctactcactagacgtcagtagccctctcccagttatgacaaccaaaaatgtctccagatatttcctaatgtcccctgagcatcaaaatcaccatctccagcctgggcaacatggcgaaactccatctctacaaaaaatacaaaaatgagccaggcatggtggtgtgcagctgtagtcccagctatttggaagcctgaggtgggaggaccatttgagcccaggagagtgaggctgcagtgagctgtgatcacgccactgcatttcagcctgggcaacacagtgagaccctgtctcaaaaaaaaaaaaaaaaagaagaagaagaagaaagaatttaaaaaacttaccagcggtcaagaaccattggagtagagagagaatttggtgaaaagacatctgcattctacctttagtctctgggctatgtctccggggctatttatcattgtcttgaattattttgtataataagcagcagcccccacgctcaggtgtttggaggagttgcaattcactgggtggagggtagagcgtctcatgaaatcctcggctcctgtctgaaggccacagctggggtgaggcccttgaatgggagaggcagatgtccctgtctacttcttccttctccctgcctcctcttggccttccttcccatcccctcctctgtgacagcacaccacaccgtcacctgggtgctcgtcagcacgcagattccagagcccggctccccagagattctgatacagggggtctgagaggggacctggaaacctgcctcactgtgagcttcccaagtgactctgcgcagggggcgtggtgaggtcacactttgagaaacaggccctagaggcttttctgaacacacgagccctcccagtactcccaggacactaaagtgtagcagaaacaagcaaaaaaacacaactatactagcaaacgtgacaaaagcaaaaagggataaaaattcctaagaaaggccaggcacagtggctcatgcctgtattcccagcactttgggaggctgaggtgggtggatcacctgaggtcaggagttcgagagcagcctggccaacatggtgaaactccgtctctactaaaagtacaaaaattagctgggcgtggtggcgggcgcctgtgatcccaaggtactggggaggctgaggcaggagaattgcttgaacctaggaggcagaggttgcagtgagccgagattgcaccattgtactccagcctgggtgagagagtgagactctgtctcaaaagaaaaaaaaaattaaaaaattcctaagaaagatgaagctattcaatgtgggaacctctctcactgaaaatggattcatcgagtcattgattgattcgacacatggcttctgtgtgcctacttgacttcaggcattattctaggcatgacgcattccgcagtgaacaacacagacaaatgtgcctgctgtcacctagtttatattttgcagggggagacagacaatgaacggaatgtagttagaaggtggccatgctgtagagagaattaaagcagagaaaggtggttagggagtgttggggctagtttgcagtatcactagatgatccaggaaggcctcgttgaaaaggtgatccttgagaccttgaaggcggtaagagatggccaggcagatatctgcaggtgagagttttctgggcaggaggaacagcaagtacaatgtcactgagctgggagtggacattcctggtgtgttcaaggaacagccagaaggctttcatggctggttcaggctgagtcagggaacaagtgtaggagctgagggcagagagggaccaggaggccgagtcctgcagagcccatggcagggacattgactttgactctgaaggaagtggggcgggggccaggggaggattttaagccgaggactggcaggatcagatttaagattgaaaaggatcaccttgtctgttttcttgagagtggactccaggtgggtaagagtagaagttatcattactattcaaattatggcacggtttctgccccctaggaattcactgtgatggtggagatagaacatgtacagcttaagtaaggaaatgtttgctaagtgctatgaatgacttagagaagtgctgtgtgagtcagtgaagggagacatcccttctgggagtcagacttcgcggaagagcggggccttaggatgaatgaacaagactttggtttttttagtgtgatacataattcaccatgcacatccagtgaatggtacacatttaaagcgtacactttgatatttttggacatatgtatccacccatgacgctatccccacaattataatactgcacatatccatgacccccaaaagttttctcatggttgatgagggagagagggagttatcatcagggcaggaaccaaagtgaaggtgcagaggctgggaaatgtaggggcttccatgagacagagggaggctggtgctggtgctcctgggggaagtgagggacgtgtgacaaggtggcctgaagaaaattgtgtggggcccaaaacactgggtcacaggggaatggggcaagtacttaaatttttgtaggacatggtcaaatgatgtatttgttaaaattccatcttttttcttttttgtgttgagacatggtctcgctctgctgcccagattagatggcagtggcgtcatcatagctcactgcatcctcagcctcctgggctcaagggatcctcccacctcagcctcctgagtagctgggactaaaggcatgcaccaccgcacctggctaatttttgtattttttgtagttgggatttcaccatgttgcccaggctggtctcgaacttcagatctgcccacctcagtttcccaaagtgtggggattacaggcgtgagccaccataccctgccaaaattttaccttttaaaaacaatggcaacaccaccaaattttaggtatttaatctttttgtagtaagtttaagaaaacacagccaagggcggatcatgaggtcaggaaatcgagaccatcctggctagcagagtgaaaccctgtctctaataaaaatacaaaatattagccaggcgtggtgatgggtgcctgtagtcccagctactcgggaggctgaggcaggagaatggtgtgaacctgggaggccgagcttgcagtgagccgagatcgcgccactgtactccagcctgggctacagagtgagactccgtctcaaaacaaaacaaaacaaaacaaaacagccaagtacatttatgcagcatttcatgaatatgaagtcaattaaaagaaaaagaaacattaagcaattttataattagataattaacagaatccttgatagccttatactaatacaactacttgcagattgaaaataattccatttgctgcctgctggcacattaaagcctacatgtaaaaaatacatcaagtctagatgggcttcagtcatttgaaagtaatattttagtgcattctagtataatcttgattagtgcttacatgcgtatagttcagcactttattttgtgtcatgttgaacatgaactttaaagttaagggaaacattttaagtacgtagtaggaatctactttcccatcttaagctctgaatctatttgtgaagggatcctatttcccaacagccaagggatatactggagaacaagattttcagggttgaagatacgctgatgtgaaatcaggtttctctctctttttttttttcttgagatggagtcacgctctgttgctcaggctggagtgcagtggcgcagtctcggctcactgcagcctccgcctcctgtgttccagtgattctcctgcctcagcctcccgggtagctgggattacaggcacgcaccaccacacctggttaatttttgtatttttagtagagacggggtttcactatgttggccaggctggtctcgaactcctgacctcaagtgatcctcctgcctcggcctcccaaagggctagggttgcaagagtgagccaccgcgtccaggccaggtttctctttctacatcttctgggaaaaggttggcagctcctaggagatactgaccagttagttgatgggtctgtgattcaaatcgaacatctagcaaagcccctacgaagcattagtcactcttgtgggagaaatgaggaagcgttttcagtaggctgttagagtgagaagcatcagattcttagttccatggaaatgaacgcctcttggagtgtttcatcttttaaaatagagaaggaagctgagagtcattcaggccatgctcagagatgtcagctcaggaactccaggaacccagtattattttgattccttccttccttccttcattccttccctccttccctcctttccttacttccctccctcccttccctccttccctcccttccttccttccttccgatatgggttttcctcatgttgtccaggctggtcttgaactgctggctcaactgatccacctgccttgctttgggctcccatagtgctgggattacaggtgtaagccaatgggcccagcctattgtgatttctttctttctttctttcttttttttttttttctgagacagggtctcactctgtcacccgggctggagtgcagtggtgagatctgagctcactgcaacctctgcctcccaggttcaagtgattctcgtgcctcagcctcctgagtagctgggattacaggcacctaccaccatgcccggctaatttttttatttttaggagagatggggtttctccacgttggccaggatggtctcaaactcttgacctcaagtgatccacccaccttgacctcccaaagttctgggattacaggtgtgagccactgcacccgggctgatttaagagggctttgacttgaccagatgtggtggttaagtgaatatgatatgttcccttctttatcatcctctctgttcttaattgcaaaagcgccaaatcctcctagataaaagacagccctaagatcattgtcaccatcctccttatcctcatcccaacattatatgaagttctaaatttatacaagttactgtattagatactgagactagttacattgataataattactaccatttatttaagggtgataataattactaccacttattcagcatttaccaagggccaggtctgtgctaaaaatgttgcacatattatcacatttaattcttacttaactcaataaaataagtatgattattgactcccatttttacattaaggagactgaagcttagagagatttgtgaaaaatggctcctggtcactcagctactaagtaatagaagcaggacttgaacctcccatacccttaaccaaaagttttcaaaatagtcaacactgtccataccatctagttggaaaagatgagacctggacataaaaactggccaggcagagtggctcacgcctgtaatcccagaactttgggaggctgaggtgggcagatcacctgaggtcaggagttcaagaccagcctggccaacatagtaaaactccatcggtactaaaaatacaaaaaaattagccgggtgtggcggtgaacgcctgtagtcccatccacttgggaggctgaggcaagagaattgcttgatgcagtgagccaaaatcacaccactgcactccagcctgggcaagagagaaagactctgtctcaaaaataaataaataaaagcattttcaggggttgtgacgagaaatgcctcacccattcttttgagtcatttatgaactgttcttaatcatgttacgttctaattaaacatctcccttttcttttgacgtggaaaagtctttaccttctgcaatacctttttcacatgttgcagcaagcagccctattaatcgcattcccacctgcctttggccctcccagctgcctcgcttgcagaacacgatcgttcaaacggaagtcattcatgggatcgcctctccctgcagtaatccagagcagaatcacttaggctgagcacagctgctacatcccagggtaatttggtttcttatgtagaaaaactgcggtctgacatttaacatttcctcctctggagagtgtttttttctttttttgtctctgtgaacttattacccagcatgtcttcacgcctttacattcagcgtgttcacgtgctcagcgcggtgttcatgcccgcaccattgtgtgatcaccatcactgggtgaagggctgtgggcttacaaagcagactgggaatcacaatgacaaaccttgggttcagactccgggtaggacagaaggaagtttctacctgagtttcatgctaatcaagtaggggtgcaggcgatcaagcaggggtgcaggggtgcacctgcgatctcagggcatggcctcgttgctgtcactactgcggttgttattttggctgtctcaggcctcacctggagcaaaccctaattctaacacactctgtgttctttcagatatcactcccctcttcttttcccgtctttccagaatgcgctgtgcttgtgtcctctttgccaatcagagtgagccgcttggggactttagtccatgcacatgtcgtgtcagtgcagatgatagaaccttgagggtggtgacttccccacccggagccatgggtcgtgattcctttgtcaggcgttctgattggttcctggcttccctctgcggtggtcgtataccttgtgtgtggttctgggagctcatgaacaacaggaatcaaggacactgacctttcgccatcagcaaactcctgctgtgtagattcaggggcgaagagagtctcgcggtgagaaatactctgggtgagaatgaccctctgtgtctccttggtccttcacaccccatcaagcacaggcggatcaggagatgtaaaggtcagggagctggtaagcatcgacgaacaaaatcttcctgaggaagggccgggtgcggtggctcatgccggtaatcccagcacgttgggaggccaaggtgggcagatcacgaggtcaagagatcaagaccatcctggccaagatggtgaaaccccgtctctactaaaaaaaaaaaaaaaaaaaaaaaattagccgggtgtggttgtgggcgcctgtagtcccagctactcaggaggctgaggcaggagaatcacttgaaccagggaggcggaggttgcagtgagccgagatcgcaccactgcgctccagtcttgcgacagagcaagactccatctcaaaaaaaaaaaaaaattttcctgaggaagaagtagcatccccgagctggcatgttgggagtatccttcaatttcagatgcttaaattctcctctctgacaatggctaattaagatttggccacattatctttatttctcttcttttgaaattagtgaggggacctgaccttgggtgatccgcccacctcagcctcccaaagtgctgggattacaggcgtgagccacggtgctccaccacctacgtgtcttcttgtattcctcttcatgggagaagtagggaaaaaatgatttggtatatattcctgaaagataagagtgttctaagtatcgaatccttacacttaaaactttaggttgaaaatgttgcccaagtgccaataaaaattgggaccttaaacatagaagttcaccttgtgggtgggcccatcgctgctcccgtgagactatctctgatccaggatggatcagagctaggtgatacagatgtctctgaagcccacgagctaggcagcacgacagactggatgcttcttttggtgccagctgatccagaggacatggccctagtccatctcctagggccactgccattctttttgtgtccatatcaggaaagcatggtataattcgaggcatctatggctctgaagacttcttttctctctctctctctttttgagacggagtctcgctctgttgtccaggctggagtgcagtggtgtgatctcagctcactgcaacctctgcctcccaggctcaagagattctcttgcctcagtctcctgagtagctgggattagaggcatgcaccaccaacccagctaatttttgcatttttagtagaaacagggtttcaccatgttgggcaggctggtctcggactcctgacctcaggtaatccacccacctcagcctcccaaagtgctggggttacaggcatgagccatcacgcccggcctccttttctcttttcttcctatttatgactaccctcccttaaagcagtatcttctttatttcagcacttacagaaagctatggctgttgaccattcctttttgaagttgtgagttgtactaaaatatttatgtataatgtgtggataagcacttgatttactgaggccttttgatgataagaactcacaaagggttttagatcaagggtggcttcattgaagaaacacctctgacatcagccagcaaccgcattttcattaaagactctcaatctcagcctttccctggacgagagaggaatgggttgttggctacttcctggctgtctgtggcggtcgtattgatgttgggcccagctgtgctgaatggctctgttggtgctcgctgggcttgctttggctggcacagctgtgagtggaggacagctgtgaggagcgggagttggtgctgattgatgtcttgtgaaccccggcggagcactgagctccatgtatgtacggattggtcctgtgagtcactacagactgggctagaggtggcagcagaggcatgtggcgttaggtagtacaggaaccaagaaggccctctggactgtgaactctcagagaacgggtgttgttctcatgcaccctcagacccccagcctggggcaacactgggcgtgcaggaaaccaaagtctccgcttgttaaatgtcagcagctgagccacaaatggcaataagctgaataaagaaggtggtgcttcaagggagaggagtaaaaacaaggaagaaaagagaagaggggccctcagagccagggatggctcatgcggtttctggagagtggttgtgtccctaggtcagagtcaaatccagactccaagggctagcgttggaaataaactgtgatgtgcagacatgacttctcaccctctctctctctctttttttttttttttttttttttgagatggagtcttgctctgttgccaggctggagtgcagtggtgtgatcttggctcacctctgcctcccgtgttcaagtcattctcctgcctcagcctgctgaattgctgggactacaggcgcccgccaccacgcccagctaatttttttgtattttagtacagatggtgtttcaccatgttggccaggatggtctcgatctcctgaccttgtgatccgcctgcctcggcctcccaaagtgctgggattacaggcatgagccaccgcgcccggctgaaatgacttctcttagagctgcctcctttctgtggcacctcttccatatgattgggttagtaaaaatattctaaataagcaattgatttgaggctttttgaagccaaacagtttggtgccttgagagcataagccattgcttatgtgaaaaaaaacaagaaactgtatctttgcatatactggggcccaaataaatcccgtttgaatgaatgaacatttcctagtgaaaacatggggctggaacccttctgtgtccgtgggaaaataggaatctattgatggatatggctctttggcttaaagtgaaaaatcatgaactggtggtcaagaaatctaggcatagtccacgcttttaaccctctgggacctgtttttctgtaaactgaggtgacgctctgttctggaacagcccctaaggggccgtttcaggtcctgctacacgctctgagttgtgattagagactctctggccctgtcatcgaggaggacgcctcgagacaggcctcatatggtttgcatcacttcctcaaccagactcgctcaacctgaacctcccattgcttcccatcattgtgtctggctgtcttgagtgtctccctcctgagccaccccttgctgctgcagtgtaaagaggcctcttgatttattaatcaattaatcagtgcgtgctgaggagctgttcggggtagttaaacagggaaaacaaacagctggagcctgcaatcaagatggatcctaattaagaaccaccccccaaatgctgatcttcctgccccgtcactgcctcacaactcccccccaccagcctacagctcagcaaaccgccttcagctctgatggggcttctaccccatgcaagctgacagtgaatttccgaagggcagattttctccctaatgtcctagaggtaaataagccttgagatgagcgttatcaattacctgcaacgactgttgagcccccaaatggcgtagtagccctgttcatataggcacagcccacactctcctatcccagttcccccacgaacggagtcatggagctggaaggtccttacgataaggagaggccatggcgctgtggacagacgagaggttcagtgaggttcagtgagttgtctgaggtcactgcagaactccaaggtcacaagtggcagaactggaaactatctgatactcaacgaacactcctggtgcttgtttctctgtgtaatcctaaagcaaagtaaataagagacattgttctcactgaatccattaaatgcttctgttccagtggtacttagcacacaatgctgagaaggccaagattttcttagaacagaacctctgttcgaggttgcaagttgcacctccatctgcaactaactttctgtggtaacagggggccaagggacctcagtgcagtggtccagaattgcactcaccccatatcatgcctggacaaatgtttgttccttctgattgaacaccttgggagagcccagggatggctataattcttcagtggatgtaagaataagaatgttcttgccaggcatggtggctcacgcctgtaatcccagcactttgggaggccgaggcgggtggatcacgaggtcaggagattgagaccatcctgtctaacacagtgaaaccccatctctactaaaagtacaaaaaattagctgggcgtggtggtgggcgcctgtagtcccagctatttgggaggctgaggcaggagaatcacttgaatccagaggtggaggttgcagtgagccgagatcgtgccattgcgctccagcctgggtgacaaggcgagactccatctcaaaaaaaaaaagaaaaaaaaaaatattcttgaccagcctggcgaagaagatacttagaagtcttatttatttttttaacttctttttgaaagttttcactataaaattcttacatttgtctaatgtgtttatcaaaaatagaggcttttctgccagtgtgtcttctcatttctgtggaatgccaatcaaactatccaactctttgagtacgtctcgggtttgactggtaagccaggtatctgacttgcactagcagccttggagttatagaatctcctctccctctgcttctgtgttctgtaggaccctgctttctcggctgtgattcacgacaaactccaggtccccaacaccatccggaaggcatggaacgaccgggacaaccgctgtgacatttgcgccactcacctgaaccagttgaagcaggaggccatccagatggtgctgacgttggagcaggcagccggcagtgagcactacgacgcctcgccctgctccccgccaccgctctccaacatccccaccctggtggggtcccggcacgtgggtgggctccagcagcccagagactgggcctttgtgcccgccccctgtgccacctccaactacacaggcttcgccaacaagcacggcagcaaacccagcagccttggggtcagcaatggggcggaaaagaagagcgggtccccaacccaccaggccaaggtcagcctccagatggccaccagtccaagcaatgggaacatcctcaattcggtggccatccaggctcaccagtacctggatggcacctggtccctgtcgagaaccaacggggtcaccctgtacccataccaggtaagtagcctgtgtgagccaggaagagcagggctggctggagtcaaagcggagaagtaggcagcacttccttccgctgcctcctcccgggaaccctgtaactcagagcccagtgtttccatgtggcccccacagagttctcatcaaggtgccccacccgggcctgcctgctttgagagggtgttgctacatcttccaaactttccacacctgccctttctctgctcttcagtgtctccttcctgagagaccctctttgtgtaagaggtccttgctggtccaggtgatgccagcgacttcccagccagcagatttaccacatggcagagccatgaagaggtaggccacacagatacttggactggggtccaagccccgacttgtccacttattagcagcgtgacttggcacaaggggtttgccctgtcttaggctcaagtccctcatttataaatggatgtgagtcacgagaattaaataaggtagtgtttgcatgacatgtaggccaacacctgccatatagtaggggatcattgttgtgcctgttaacagagattttagatattaagtgagagtgagatgagtgagatgcttttgaaccaaaggatattgtgagtcccaggaatcacggttttaaagcagcctgtggaagtgctggacattgctgagaataaaatatacgaaggaacagtgatccgtgttggcactctgccttccctgtctataccttccaaaagaggtgtagatgcccttcttaacctctcctcccttgacagacccaaattcttttctatttgcaactcaccttaagaactactgggattgggctgccaaaactgtttcttccttttcagttatttaaattagaacatgcccccaagtttctccatagaaataaaacacaggtcttaaatctcccagggaatctttaaagatgttctaattttgcccgggtgagttttctgttggatgaggactggatttttaatgtaagtggcctccatatcccctgcatcaggggtgtgggaagcagcagagagcattgaccgtcactggaatggagaggcggccacggtcaagggtgtattactcagagaagatagttggtacatacagcaaatgatcctggagacctcaggctttttctcacttgggtctgtcatggtgggtgtttggtaggtggccttctgctgcgatgtgaggactcagactagagacctcaggttatttctcacttgggtctgtcatagggggtgtttggtaggtggccttccgctgtgatgtgaggactcagacttcttccaccaaatgcgtcaccatcttccaggggcctcaagagtccttcaccagaccttctgtaaccagccaggaaatgagggaagatagagtgtgtggaggatctcacaggaggatttggggcccagctttgcatggaagtgatgtatgttgcttacatctatattccagtgacaagaatccagtctttgctgggcgtggtggctcacacttgtaatcccagcactgtgggaggccgaggtgggtggattgcttgagtacaggagttgaagaccagcctgggcatcctggcgaaaacccgtctctattaaaaaaaatacaaaaattagccaagtatggtggcatgcgcctgtagtgtcagctacttgggaggctgaaacgggaagatcgcctgagcccaggaggcggaggctgcagtgagccgagattgcaccactgcactccagcagcactgcactccagcctggtgacagagcaagactctgaattgggaaaaaagaagagtgagagagagagagagagagagagagagagacagacagacagacagacagtttagtctcttgatctcaccttcccactggtgaagctggggaagccaatctacccgtgagcccaggagaaaaaggaacaagtcgagtgaacacatagcatagttttgttacgccggacaagatacagggaaacgtggagtgagttaaatgtggttgataaaatgccgggtgactttctctagagcgtttgagagtgttcatgtctcttgctatcttgaaagaaagtgggaaacgttgatcattatcctaagatattagcattcttggacggtcgaaattttcacttaactgggtgctttctaatttacaaaatctaacatatggattatttcctttaaccccacagtaggcctatgaggtaggtggggcaggtgttagatcttccttttacagttaaggaatatgatgcttagagaaatggactgattgtggccacacagccagtggcagaaccagcaccagctctccccttgcccagggaatggctttgcctaccgcggtttcttccaactttcctaggctaccccaaagtaagctgccgacatcttttccagatatggttccttttcagacctggtgtcacaaagaaaagaactcgttttacctgcaggggcctcactgcccctagacttttggatagaatcttctgggatgtgtatataaatataatgaggaaccagtggcgtcctgtgcagtgcttcacattctaaccttggaagtaaccttctagggcaggaacagagaagggcttctttgcatcatgggataatttgcttttttttgtttgcagttttaaaatataccatttagaaaattatcaaaagtaacatatttgttgtaaaataaaatttaaaatacatgaggaagtttaaatgagactttaaaagtcgatgtcacccggatataaactatgtaacatttggggatacttcctcctagcatttcatacactcgcaatttgtaaaattgtgaccaggttcaattctgtgacctgcagttcacttaatacattgggtacatttccccatgccactatatgtttccctaaaatattatctttagcagtaacatatttcattatatgaatattttccacgctatggagatgtcctcatttattaggttggtgcaaaagtcattgcggtttttgtcattactttcaatggcaaaaaccgcaatgacttttgcacccacctaatatataaccaaacatcaattaattagaatttaggtctttgctactataaatacaatgctcaggtgaacatccttttacccaggccatagtttcaacacatgcctggcttgtgtgagccacatacttgtgttacacagacaactcacatttcaccttccaggactccgaagctcttgtcacacgtggcaggggccggttagaagactcggcggctgcgccagcgctgatgagcgaggacagaggagcatgaaactggtgctttcctgtaaaatattcaaagtgaggtgaaagtttgtgtgtaagtcggaaacactgaagatgctgcttaaacggccgattagggattatttgtgcgtttcttttatttgtgcaatgattctgttcttcctcttacttcccaaactcagatgaaagagaatttactgtacaagtatttattaatctctaaccaagtaccaggcactgtgctaggtggtgggtggggccgcagccttgggctggaaaccctggttcctgtcctgaggtccttgcagtgggacagaaggcaggtgagtgcagaggtgaagagatgccgcggtgctttgggggcatgcagacaggctcctaatcccgcccgatgtggcaaagccagatacaaccaagattcacacaagccaccaacttgtggtcatcctgggtatgttctgttgcttctttccaactccagaacagaccaattcatgcatttcccctcagtaatgaagggaccagaggaaatctctctgggataaagagatttggtgcctggctatgaatctgcgtcccctgtgttgtgactgtgtcgtcctgatgccctggggtgggggctctgggtctggccagactgagtgtctcctgttgcggacatctccctgcagtacatattgtacagttcgcagtctagccagctcgtcagagacggttgactgctctgaaagctgacctcatttttcctgcttacccatactcccacttccctccccacagagcagatggcctctggatcagtgccagagccattccccgggcagagaagcatctagaccttgtcactaccaagggtgcggctccacacccgcgggacccgagcctctagaaatgagggagaagacgactctgcctttctgcaatttagacgtcgcaaggatgaaaacgatgcggacaggctttccagcagtgagcctggggaaatctgcgtcacatgggcgacagaaggtccctcgaatccctcaatccccgtggcccgcaccactgtgtaataatctccaaaggttgcagtaggaagattcttgattctcgtttgctatatccttcacatttctaaagtacctccagaaagaccaggaacctgtaagcatcacagataaataggaatcgatccagagagattttaaaaagagtaatttaggaagtactaagatgacatcaaaaatgttgaacaaaccacaaagataattctcattaaatatcttagaaaattgatttaataggagattataagacgggctttcaaagaaagactttcttctgttcatctgcagacatttagcacaatctatacacacacagagaaagcagaaaattctctagcgcaggggtccccagaccccaggccacagattgataccactctgtggcctgttaaggagccagccgcagagcaggaggtgactggcgggtgggtgggcattacctcctgagctccatcccctgtcagagcagcagtgccattaggttctcctaggagcagaaaccctactgtgaactgtgcatgtgagggatctaggttgcatgctccttatgagaatctaatgcctgatgatctgaggtggagcagtttcatcccatctccgcgccctatttgtctgccatgaagctggtccctggtgccaaaaaggttgggaatcactgctctagaatcttcatcttttttcttccaacttttatttctggtttgggggtacacgtgcaggtttgttatgtgggtaaattgtgtgtcactggggtttgatgtacaaatgattttgtcacccaggtagtgagcatagtacccaaaaggtggttttccgatcctcaccctcctcccaccctccacccccaagtaggcccagtgtctattgttcctcgtctttgtagccatgtgttacagccttcatttgaccacatgaaattgtgactttgaaaggatgtgtctagattagttccttgtaatcaactacagattagttacctctttttgaatggcagctgcttttgcctgattaacatttattatagtcaataactgcaggaaagactgtacacataacacacggagttataggatgttggtgatgttggtgttggaatgcacctgtgtaggatggtaactgtcttttgcatcatggtaggagatttggagacagagtcttacctagttcaagcctgtggtcccaccaactattaaaccagtttagtagcttgacatcttagtctatttcctcacctatgaaattcctacctcatggggtgattatagggaacaattaagaagaaggcgtgaaaatattttatgaactataaagcaggaataccggtataaattatctatttcaaccttttcatttaccagaggagaaacctgaggctgagagatttgaagcttcttttgttcagagttttctaaatcctagtttgatctcttttgctaaatcacacactcttggacaacagggactcattttattctcacatccctcacagcagctaacgtgaaaatgttgttctttattagagacagctcctatctcagggatgcactacaattactttccatgactggccctagtttaggaaagaattccaggccaaagacctatctagaacccaaggatttaggtggaaaccaccaggtatttgattccaagctaatctttaacctgaagtgtcttaatcatacttaataaatccttagatgcagtggaaagaacctcgctggcatttcgatgccacactcaatacaggggcatttgaaaggatagaagagctttatttcataggatttcactcgattgaacttgtcaagaaaattcagaagatgttagcttaatctacaagtaataaatccatagtggaccgttgatgcaatgaaggtcgtccatgtgcattccttgagttgcaggaaaatgctcttgatacaatttttcctgctttctctaaaaacatgcattggaatgaatgtgagaggtaatgctggactgaacactggccgaagtcattatgaggtagtctctattacagctttagaaatgattgcgcctatgaagcacagccattactggactttacattttaagatatgagcacagtctgggcacggtggctcatgcctgtaatttcagcactttgggaggccaaggtgagaactgcttgaggccaggagttagagaccagcctaggcaacagagtaaaaccccttctctacacagaaataaaaaatcagccaggcgtggtggcatgcctgtagtcccagctactcaggagggtgaggcgagagggttccttgagcccaggagttccaggctgcaggaagatgtgattgtaccactgcctgtaacctgggtgacagagacccgagaacctatctcaaaaaaaaaaaaaaaaaaaaaaaaaaaaaaaaaaaatatatatatatatatatatatatatatatatatatatatatatgggcacaaaaggatgtaaaagcaacaccaacctcaacatatatcaaggtttgctaaatgacaggacctctgcggtgcataacacttgctcctccgagatcagaagccctgggggatcttggtgctagaggacttccaagcgcccctgcaggaggaaggtgaggctctgggaggcccaccaagtgctgttgtactcagaggctttgccgattgtggcttcgtggaaagcagaagcgtgtgttctagtatggctgatgtcgggagatgaggtatacacgtgctcttcccggccgaaccacttttcaagaaggaacaggggtgggtgtttccagcaggtcaggagtataggattttcatccacgttcttcgcagctcttgagggctcatccagccacttgtgccctgaaatatgcagcacaccccttcttgggccagcactggggtcacctgcttcccacttgctgctgtgtctacccagtcaggcaatagtgtaagatgccacgattagaccaattatgacgtggaagagattcttaagaccatgggttttgttttctcctgtttataggcggtcaaagggatattaggttatgtatctttatgctttttgacaaattatgaacatggaaaaaagaatcaatttgtatattcggtcatggacacacatttctcaaggctagagtgttcagggtgaaattccaaaagggtagtcacagcttatgaatatggatggggccgtggtctgaagggaacacccagacttcactaggaaacttcaaaaatacgttcaatctgggcgtttgcttggtgtggtagactgaataggggccccccaacgatgcccacaccctaatccccgcaatctgtggatgtgttaccttacatggtaaaagggcctcagcagatgtgattaagccaaggatcttgagatgggggatcatttaatttaattttattattattttttgagacggcgtctcactctgccacccaggctggagtgcaatggtgcgagcttggctcactgcaacctccacctcccaggttcaagcgattctcctgcctcaacctcgggattacaggcatggaccaccatgtccggctaatttttgtatttttagtagagatgaggtttcaccatgttgtccaggctggtctcaaactcctgacctcaggtgatctgcctgcctcagcctcccaaagtgctgggattacaggtatgaaccaccacatccggccaaggagatcattttagactatctgggtggactcaatgtaattacaaggatccttaaagaggaaggcaggaggatcagaaccagagagaggaggtggaaggacagaagcagaggtcagagaggagagagatacaaatctgttggctttgatgatggaagaaggaacctctagaagctgaggacggcaagggtgtgattctcccctagagcctccagaagaagccagccctgcagggccatttttgagttctggtctccagaactttaagagggtaagtttttgttgtttgaagctgctaaatgtgtgctattttgcttcagcagcaataggaagctattacaactggtgagccttctgttaactgaaaagcttggtaaggagaagcgggatggggtctacagaccaaggagtccctgcagaaacctgcaggacagcaagaacgtgggcttttcatctcacacaacaaaccccgttaccctgcggatcggccggtccatgcacaagtcagattctttcatctgggtgccaccacagaatgagaggttactcatactgcaccgctggtttgcgattgtctcagatttccctattgttatagaatcataataagtagcacaccacagcgactctccattggtagctagtcattacaattatgtaagtctcatactgttgaaactgcagaaatcattccaagctgggggtgggagggatggaaggaacgggaggggaaggagagacttcactgaatttcatgtagaaggaagttcatctttgctagaggccttttgatctgatagaaggagatctcacagaactgccccagcaataattcttacctcatctggtaaagatcttcataatgcatgcacttgaatgcactttggacgttgtagagcagcatgtgagtgtttgctggtatcacgttttatctggtaggcaggacacagtcaatggggattccggagcaggggaatgggaagatttctttgcctgaaagcaggaattctcaattttggcttcacactagaattacttgggagattaaaaaaaaaaatcctaatgcctaagccacaccccaggcgaattaaatgagaatatctgcaggtgggacccaggccttggtttgaacttggccaagtccaagaaccacagtgttaaggaagaatttatctggcactggcgtaataggtacagggaagagaacaatgaatgtgtgtggatagatgagtgataggctgagagacaggtgtttgtttcttatggctgccatcacaatttactactaactatgtggctttattttttattttttatttatttttttttgagactgagtcttgctctatcacccaggctggagtgcagcggcacaatcttggctcactccaacctccgcctcctaggttgaagtgattctcctgcctcagcctcctgagtagctgggattacaggtgcccaccaccacacccagctaatttttgtacttttagtagagacagggtttcaccatgttggccaggatggtctcgaactcctgacctcaggtgatctgcctgcctcagcctcccaaagtgctgggattacaggcgtgagccactgtgcctggctcactgcaacctctgcctcctgggttcaagtgatgctcatgcctcagcctcctgagtagctgagattacaggcacgcatcaccacgcctggctaatttttgtacttttagtagagacagggtttcaccatgttggtcaggctggtcttgaactcctgacctcaggtgacccacccgcctcagcctcccaaagtgctggaattacaggcgtgagccaccgcccccagcctgtggctttaaaagcaacaaaaatgtattctcatagttctggagactgcaagtctgaaatcaaggtgtcggccgtgctgtgcttcctctgaaggccccagggaagagtccttcctcgcccttctgttggctccaggtattccttggcttctgatgcatccctccaatctctgccttgggtctcgctgtgtcctcttcttttctataaggacaaaagccattgggtttagagtctaccccaatccagtaggatctcatctcaatccttaactactatatgggtgcaaaagcaattgtgggttttgccattaaaaatcatagcaatttctgcaattacttttgcacctatctaataattacatcttcaaagaccctatttccaaataaggtcacattctaaatagatagacagacagacagacagataactagctagctagataagatagataaataaaaagaagaaaagtgaagttgcagaggtaaaaggtacatgcgggctctttccttgctgaaccacttctgaagaaggagcaggtgcagcatccacggctggtcagcagtggaggattctcattcatgttctttgcttggaggaaaaaaaaggaacaagtggaaaagatgaaaacgggccaagtcgagagagggagggacgtgtcatacctgcatgcatccttatactggaggggagcctctcaagagccagacaaaatgaaaaaatgctcagggacaaagtcaacgatcaacctgtatgcgtgggtttttcatagaataacagcctcctcttctgaacttacagaataccttgtaagtcatttgtgctttcacagccacagacataaatgtaaacagcacctcttgggccaccacctgagagtagataaatttaagttgcgagcctaatcagactgctgctgggggagccttgttccttctctaccgatcaagctgataatttggtctgtattttttgtttttatctttagtaacatttctaggctctaaaaggaggctagaaacagcaggtaagatgctgtgtgccttcaaggggaatttcttagttactagtaatagttacttaccatccctccccctttttgatgtgggtgagaggggttaggtggggaggtggggggtggtgggaatgtggctattatcacccaagcaagggaggagttattttcccctcccaggcaaagcttgggttgggggcagagctgagcatccctgcacagggggtgaaacaggtgggagagaagattgcctagatgtagatgcttttcacagtcgtcttgtgtgttagaggtctgcccacatcctgtctcactcagccaccctccccagaccttgttccctcaggctgaattttcactttcctatgggttgaagaaaagagccagggagtatgcaggctccatggtgagcaggccaagggggaaacaacagctactgctttttttcattttaatgacaaagaaaacagatcgttttagaaagtctgaggctgatactcatcaatgattttatccaaatctcacacaatgagaggttggggtcatgctggatttgctgctcatgcaccagaaataaaacaccaggttccttgctgactgtgtgacctcaagcgggcttcttaactgctatgtgcctgaatttcctcctctgcagagtggaaacttccagagctgttgttgggatcatgtgagagggcgtgttttgcatacttagtgctgtgtgtgacacatggcgacttctccgtgaagttgactgaaccttgagcgccattttcttttactcaactcaagttcatgtgactcaagttaaatggaatcaggaccctcttttccattgtaagagccagtggcagatgaaaagacatcaatcaccaatttcataaagtgaatatcaagcacataaaataaatgttatcctgcaaatctgaaaacattccctccttgacatattgccaaaaaatcaactttccatatgtacatcacatctcgtgtgagaatgtcatattttaagtagatgtgatctcattttatcattagtgaattaataaaatactgaaaggctcattgaccagttttcccccatatttggggatctttctaagggaggagggaaagcagcaaatagattcgaatcatttaaaattttacagcgtagtggacaggtcacatttaaaataacccaaacaagtcaaacgttattattttggaattcatttgaaatatcaagcaattcaggcctagtttatgatttttttttttttttggtttgtgattcttaccgaactctttgaaacacaggactcagccctttcattcttggtttccttatctatatgcttatggtatattattaatatgtttgctttcctattcttttatgtatttataaaatataaacctttcttttaaaattattatataatttgcaagtttcgataaattggaaaattgaaatgtcctcggctggtcgcggtggctcatgcctgtaatcccagcactttgggaggccgagacaggtggaccacctgaggtcaggagttcaagaccagcctggctaagatgctgaaaccccgtctctactaaaatcacaaaaattagccaggcatggtggcatgtgcctgtaatcccagctcctcaggaggctgaggcaggagaatcgcttgaacccgggcggcagaggttgcagtgggccgagattgtgccattgcactccagcctgggcgacagagcaagactccgtctcaaaaaaaaaaaaaaaaagtcctcacctaccccaccccagacatacacctaattcatttctaattgagattttactgtgctaacagtctttagtgtgatgaattagcatgcctttatcttatagaggtatttgtgaggattagttaatgagtcatatatttcatatgcttaagtcactccgagggagtcatttaggtgtttagaagcatattagtcactaattttgggactctggagacttagtccatttctgcagcaccactggccccgaggagttaacatatccctccattgctcatctgagagcctgggcaatgacttgagacactggggagaaaaaaagattccatatgaaaagcaaagacagcagcagccatgtctatattcaaggctgtggctgggagttgtctaattagatgactcatctgagccagcctgatggtttccatcaccttcactaggctgctccccaccgtccattaggctgcaaggcgctgcgtcgccagggaggttgaccccacctgcttgttcatgacgtgctcccttttggttcaagcaacagacatggttggaagcaagactagaaggcagccctcaagaattacaaatgacaaaactgaggcccaggcctgtcaggcgacctgtgccaggtcacacggctaggaagtgacagcgatgggagtcaaacacaggtctcccatgcatttacccctgcccctgccccagcccctctctggagggaaggggaccgattcctcagataggtcagatttgcaggcctcctggggagggttacccaccgcacacactcctgacgtgatttctttgggggcaatttggggtgcctaggatttccaagccaggtttctcatcttattcctctgcatagcagtttagaactcaatgcgctgtattgtatctcctccctgggaggtggggaggttggtggggttaaaaccgaaagacactgatgggccaaaaagatgaaaaaaaaaaaaaaaaaaaaggctgtgtgggcaatgctgccatctagtgagacatactttagccaacctaagaagctgagtggtcctggtagaatcccaccgtaaagtatttcgatgtcctaagcttcatcaaaggagacagggccatctccctgtcagtagcgtggtctttaacacagtagtgaagggttaaattcagtgtcctaacatctgtccttcagaaaggacccgtggcctgaacagatcttctgtgagaatggagcttggttttggcctggtagaaagaccacacagatctgcatgtgagtgctggctcacctgcttagtagctgaggaatgtttgttgttgttgttttaattgtggtaaaatatgcctcatacaaaaaatgtgtcatctgaatcatttttaagtgtacagttcatcaagcttgtccaacccgcagcctgcagtctacatgaggcccaggatggctttgaacgcagcccaacacgagttcgtaaattttcttaaaacattgcgagatttttttggtgttttctttttgttttttaactcatcagctatcattagtgtcagtgttttttaagtgtggcctaagacagttcttcttcttccaatgtggcccagggaagccgaaagattggacacccctgactcttccatggcattaggtacattgacatgatgtgcagccatcaccaccatccatccacctccagaatactctgcatctccccaaactgcaactccacaccctttcaacactcactgcccattctccctcccaccagcccctggcaaacaccattccactttgtttccgtgaatctgactgctctatgtacctcatataagtgggatcacacagaacttcttctctggttaatggtctgttgcacttggcataatgtcctcaagtttcatccgtattgtgtcatatgtcagaatttccttccttttaagggctgagtagtatgctgctgtatgtatataccacattttgtttatccattaatgtatcaacattgagttgcttccatctcttggttcttgtgaataattctgctgtgaacatgggtatacacatgtttctttgaaaccttgctctcaattcttttggatatatccagaagtagaacggctgggtcaaatggtggttctgtttttaatttgttggggagccaccatactgttttccatagtagcggccccattttacactcccacaagagtgcatacgggttccaatttctccataccctccccagtacctttttcctcttcacagtagccatcctaatgggtgtgaggtggcatctcattgtggtgtggatctgcgtttccctcatcatgagtgatgttgagcatcttttcatgtctcttggccattggtaagctgagtaatatttggtaaattacttgaccactcaaagcctcaatttcctcttccatagaatggggatagtatctatcccctagtatagcatctatggcctaagattgctgtgaagattaagttcattattctaaaagaaataaattgtttttggttctgtacactgttctaagcacaggtttgtgtgtgtgtgtgtgtgtgttttgtttcttgttttgttttgttttgtttttgaggcagagtttcattcttgttgcccaggctgcagtgcaatggcacaatctcagctcatcacaatctccgcctcctgggttcaagcgattctcctgcctcagcctcccgagtagctgagattacaggcatgcaccaccacgcccggctaattttgtatttttagtacagacggggtttctccatgttggtcaggctggtcttgaactcccgacctcaggtgatccaccctcctcggcctcccaaagtgctgggattacaggtgtgagccaccactcctggctagcactggttttaaattatatatgtatattctatattgtatatatataaattatttttatgtgtgtcacaattttactaaatatatacttacatgtatttatatataaattatttttagtgaatatatattttatatatatacacacacacacatatatatatatgtatatgtatatatatatatacagagagagagagagagaggcaaactctgacctgagaagctctataaagtcaacccacacagattactcacagagcatggctctctgcttattgcagcccgaaggcaacacatttaaaggtgaggcagacatacctaaaataattaacatgcccctgaaaaacagcagtggaattggtgaatttagaaaaccgaggcatccctcacgtctgaacacggtatccctgaaaaatagcggtggaattggtgaatttagaaaaccgaggcatccctcacgtctgaacacggtatccgtgtgtttttagcagtaatctcatgatgaatatcctgaacacagccttcgtgcagggtccactctccagcttagagattcattcccagcctacttcaaaggcagctgagactgtgtattggagtttctgttcaagacaacggtgtcttgttttcctctaaagacagattgtactttctcatgtaaatagcctttttgatagaatgcaggtgcttccagggattaactgctgctattaggctaggtggcccactctctccaccctgttcaaacagccagtgcttcatcatagtttatgtaactggcaacttagaagcagcagcctctttgatgagtccattaggaggtaggagaaggattggtagcagagaaatgaaagttcttgcacacaaataatgagtagaaaggatgaacggtggttgctggtgctttctgaacaaaatgagggcaaggggtgctgtccactaataagtgtcatttagaggctttattcttctagaaaaagggctgcccatctgctctccactgagaaggtgatttgccgactgttcctgaacgtgtgcctgggttgctaaaacttgcggaacgtgtatcagctgttgaaatggcctttcctttgggaaaactgtgcagacagcaaagagagtacaaaacacgaaaatcttaattccattccctcttctgccactttcagtatgacctcgggcaggttttctacctgcacagagaaaaactgaagtcgcacgctgctcttggttttctcagcctggagcagatgcctttgagcagctaccacttcccgttcccctgacagtgtgctccggctttacgaggctgtttttctctccacagtcaccaagtccactgtctctccacagtcaccaagtccactgtctctctccactttgggggccatctgtgaatatcactaacttagcattacagtaccaaaaataataattatagctaccacttgtgtacttactatatgccaggcactgtgctgagggctttgtgtgtcttaatgcattcaagcttcataacattcctatgaagtaaattattcccattttaattagttagttaattaattcatcaagacaggatctctttctgttgcccagctggatactgtggtgtgatgacagctcatcgcagtctcaaactcctgggctcaagtggtcctcccactttgacctcccacagtgctggattacaagcatgaaccgccatgcctggcccattctcattttaaagataaggaaaatgaggtacaagttgatagaaacagacagtacctcaccacctgcatggaggaatcacgtatttatggagtcctgaacatttaatcaacaactgttttattgagcatttagtttgttattggttgaaattaagaagactggtaaataccatgaattaataaaaagttttatgttaatagtaaacttgtttaggaaatctggttttgtctgacttgaaatattaaggaaatatgtgtaggtttaggtaagaatatatatttggtttaggactgttcatattaagttacatagtcctcagccttaattcacctcacatctccccatacatcttatgtctttttctttcttctttttgctattaaattacagcatcacctcttgatcactctaagacctaatcatctagcttgtaaattattcatacttttccccctcacctcactcctctcttttggattttatccatttatctgcatctctgagaataggtgggcaacagaaataaaaggattcagtgaaaataagttcattctgtcatttattagcaacttacacaacaggtttggcagaaaagaaaatgggaactaaaatagagtaattaaaaagaaagtcacttatttaaacattgcatatcttgctacctcttctaagtagaaattaattagctcctaacagctaactaatagactaagtggaaaatagaccagtgcaacatttggggttaattggtacaaatatattgattacagtaactagtcattaaatgttttataaggtatatatgctattagtataatctctgtatggacatcatctactgagtgcatggatgccgtaaacacatcatgcttagaaccaggcgtttgaacgctgtctggagtacttttacattgtagtaccctgaatgtacatgcctgtttgttatcactgggagggcagctcaggacaggattataaagagatggaaagaggagcaaacctggggcggcgtggagctgtcatgagaatggtattttcgggagctggggaagaggcagagaaggaagggaaaacatttaaagagggcaaaacatggacttcatccgttagctctacagacacggcccttggtagttaggcgacgtgaagccacgtgtactcaggcaggtagtggggaaggctgcttctccaacagatggagacagggaggttggcagaccgctggcttaggaggaagacagcagcagaagggttgcgtgtgtgaaggcagggtcacagatatttagaacgaagcccaaagtccttggagattggttggatgtgggaaaagagagaggatggtgaggctgagactctggtttctgtgccaggtgttgcatggacggtgagctattaaccggtgcagagaaagccgaaagagtaaggctgagccatctgaggtcaggagttcaagaccaccctggccaacatggtgaaaccccatctctactaaaaatacaaaaattagccaggcatcgtggcacacacctgtaatcccagctactcaggaggctgaggcaggacaattgcttgaacctgggaggcgaaggttgcagtgagttgagattgtgccattgcactccagcctgggcaacagagcaagactgtgtctcaaaaaaaagaaagaaaaagaaaagtatcagtttagcaatattgaaatgtgcagcactcaattattagctgtattcagcctgctgtgtaattgatctaaaaaaaaaaagacagatttattcttcctatctaactgaggctttgtaccttttgagcccagtgactccggtgccttgatgggggccgggggctatgacccaggctttgctgagcgatgagggagcgtgctacttctggggtcagggctggagggctccagctgcccatctgggctgccactatggaggagagctagacattgaccacccaccatacaggatgtgtttgcctccccctcactcacaccctggttgtggcgtaggtaaacacagcaaggctcagagggctccaggaacctggctttaagattgccattagcatcatttcctccttaaacaacctcctatttacagctctccatcgataagatatgcaatgaacaacttcatcaggttaaactgcagcaaatgtcaccacttattttgtcactctctgatcttggggggagaaaaacagtgcagcataaaatattgaactgtttactcagtatttagttcattcagtgttttcggatgcccgctacgtgccagcggggagtaaagatgagacaggcttagtccttctcttgagggatctcaccaagtgcagtgtttggtgacgcaggtcacactggggacatgccatggcaggggcacagatatcagctgggggagcagagatgaaggccagatacgaattcccctgcgcatctgaaagaatgcttcatagctttgaattagatgaactgtttataggaacggtaatccagaaacaagtactaaatgttgtatggtagggtgtactagaggctgtattatctgacctaggtttttttttgttttttgttttttgttttttgttttttgagatggagtttcactcttgtcacccaagctggagtgcagtggcgtgatctctgctcgctgcaacctctgcctccccagttcaagcgattctcctgcctcagcctcccgagtagctgggactacagatgcccatcaccctacctggcaaatttttgtatttttattagagatgcggttttaccatgttggccaggctggtttcaaactctaagctcaggtgatccacctgccttggcctcccaaagtcctgggattacaggcattagccactatgcccggctccaatctaactcttgattcctcctttataactattcatcagactgagcaacttggcaagaacctgactatcaaaaacaaattagccaggcatggtggcacatgcctgtggtcccagtgctttgggaggctggggcgggaggatcgcttgagcctgcaggtctagactgcagtgagctatgatcacgccactgccctccagcctaaacaacagagtgagaccctatctcaaaaaaacccgcaacaaactaaaaaaaatccccgatatttctgcttccctaatatgcatgataccagcagcagacagggctgctttgacacctgcccaaagtgtagctggacatctatgtagactcatggagtttggggagaataggaaggcgtcaaggctaagtacaggtcccatctctctccctcatccacttcccccaacctctggtcattcaccaagaaacgttcacagtcctgggctgcgtttactaactttgttctcatgcgtgcttctatttttgaggccagaataggccattttgaaacctctggttccagccttccccttaggaaagtgagcggcagagttgcgacctctctccctggtggctcatctctgggagacgagcgctgtcctcagaagtgacgtggaagctatcgtgacagaggtgttttgggtcagaaactttccattagtatttggagaaaattgatctcattggagaaaggaccatgatatgaacaagtcaggttttttttttatcatagtattttttaaaaaacgttctaaggagaagatttacatgaccactttctttctgacggatacttcttcctggatggaaggaataggaaaagtacataaaatagctcacatggaaaatatttttcctttgatgaaaagtgaaactaaagtagcacttgcaggatgcacttttaattcctgaagcaaaagccgctacttgcaatgctaagtcacattgacgtcccagtcctgattgggccagatttcctctttctttctcatcttgtgttagcatttaaaactgccaagataatgactatgttaattaatctggcccaggatattttccccataaacaggagtgtgactgagtaggtccctcgttccttctacgtctgcctcccgccttccctagagagaagtgaatctaagtcatgctggaaaggtggtgcctaaactgtaccttaagggggaaagggctaacagcccttctcccatagccctttcagcactgtgatcaatctgacccttacactcaatttgtctacaattgtatctctattagcaatgctgctctgagtctgttgggtggaagacatccaattggtgggttgtttctgaacactggaccagcccaaggactatttcaaggaaagtcagggtgagatttgaactgtgcgcacctttgcctgaagccagtctcctgtaattgactctgggacagtaagcattgcagaagacagcagcgtccctgatgttggaaggaagtcaggcttgcagtaaaagcttatccagagaaagaatgtcattctctcaatctgtctctccctctctctctcttgccaggaaagttccgttttgttagctctagtgcttaatgatttcagggttcacactgtgtccactctcaaaaaagcccattttcttttttttgagacagagtttcactcttgtcacctgggctggagtgcgatggcatggcctcggctcactgcaacctctacctcctgggttcaagcaattctcctgcctcagcctcctgagtagctgggattacaggcatgcaccatcatgcccggctaattttgtatttttagtagagacagggtttcaccacattggccaggctggtcttgaactcctgacctcaggtgatccgcccacctcggcctcccaaagtgctaggattacaggcgtgagccaccactcctggccaaaaaaaaaaagcccattttccatgtacacacactcacatgtgcatgcaagtatacagtcttcctggcagaactggaatgagttaaattttgtccatttttattactagaattggctaatagggatccatagcttataatgcatcaacattaaaaatgaaattatattttgaggctcactgcatataaccatgtttaccctctgaaaagatattgtcctcccttgaatatttgacgcagtaaattatgttttggaggaatgcttaagttacctatgaagtatccatttttttaaatgttggttttttctattagtttttaaattaaatggtacatgcgcataatttaaagatctaagtcatttgataagacttgatatgagagacgccagcccaacactgtgaatgcagtgaggcctttcctcctttcccaaggctcattaatattcatctccctattttaacattcttaggttgctccttcttgatttacttagttaaagtttcctattacagcagttctcaaagtgtgctccacagaccatctgagtccctaagaccctttcactgggtttatgagatcgaaactattttcatgtaatactccgacgctatctgccttttttacggtgttgacatttgctctaatggcgcaaaggcaatgatggataaaactgctggcttctcagcatgaatcaaggtggtcacgccaagctatgctggtcatgctattactcattgtcatatatttggatatttggagggtttttttttttttaagaagtacagtgttacttgagtttattttattttattttttatttttgagacagagtctcactctgtcgccaggctggagtgcagtggtgcagtctcggctcactgcaacctccgcctcccgggttcaagtgattctcctgcctcatcctcctgagtagctgtgactacaggtgcccgccaccatgcctggctaatttctttgtatttttgtagacacggggtttcaccatgttggccaggatggtctcgtgatccactggcctcagcctcccaaagtgctaggattacaggtgtgagtcactgcgcccagcctacttgagtttatttgatgaggcagtgaaaataattttattgaatcaaaaaatgtatgttgacatgtgaagtacttgggtggcataggatggtcagttgcattagttgcaagctctactagcctttccccctctgccagtagaatacatttttacttgaaggaataacaaaccaacaaactatggttattgagaagtaggtattatgaagacattttctcaaaaggaatgaaagtttgccacttaaaggaaaataactaatggttattttcctttggtttgtttattaatcataaaattttggcctagcatgatggtacatgcctttagtccaaaccatttgggaggctgaggcaggaggatcactcaagtctggggaagttccagaccaacctgggcaatataacaagaccctgtctcaaaaaaaaaaaaaaaaaaaaaaaaaaaaaaaccaccataaaattttgagctttcaattaaaagataaaattttgaaaacttgattctactaccatgggcttgaaagctttccaatactaaaatatttttctggtaagatttgtggtgatattaacaaatgtgattttttgatactatattatggaatgggtcaacgtctggaagatacagataactcagtaaaccagtattttccaaatgacctttgcattatgttacaaaatcttgcaacataagatccatacaaagtacaaggtagcctaattgattttagtacaatgtgataccaaaagtttattaatatatttaatagtttcagattgctcatttcagtgaaattttaagaaactaccacttgttgatttttagtgtagtttctaagaacagtgtacacagttatctgaatactcctattcaaatactcctccatattccaactacttgtctttatgaggctgggttttctttagatatctcaacggaaaccacatatccagacataagccacataaccaaaataatataagcaactcattaaagagatttgtgggctggggatggtggctcacacctgtaatcccagcactttggcaggccaatttgggaggatcacttggggccaggggttcacggtcatgccttccaagatcatgccacggcactccagcctgagtgacaaagtaagaccctgactcaaaaaaaaaaaaaaaaaagagagagatttgtgaaaatgtaaaacagcaatgccacttttcttactaattttttgtttagaaaataattacatttcatacaatatttatgccaacatgtgatgggtttattattttaaaataaataaatgcatctatattttaaagttttcatttaatttctagtatggtgactatcaataggtatatagtgtatttacggttgctcttatgccagagcaaccagtccagactggagcagatcaggagaccctgggaaagaactcttcagaaagatggaatgattcttataactcctatgctggaacatttcgagagcagagttacagaacaagaaggagagttttggatggaattcccaataaatacatagaaaacaaagcaaattgaaaaaaaaaaaaagataaaaaaattgaaccatgaaggaagagctctctggggctctccgtaatgtttaagattatgaagagctcctgaaacgaaagagtttgagaatcaccggccttcggcgtaattacgaaacatgaaggggtagttctctttcgccaccacccaccccaatcctacgccacagaaatattcacttcttgtcttcccattgccctaacaatttgttatgatttgggttggatcaatattctatattatgatttatgtaaaggttatataaaaatattactctgagtacatagaggctgtttgcagctgagctgtgtaatgtggcttttcatttaaatgtacaaaagggatacattttttgataccttggatctgaaatatctctctaatttgccttaacacttgatggttggtttttggcttgatattagagttctaggttagatgtcattttcctcagaattgtgaaggcatttctctatggtcttagagcttctgatgttgctgttgaaaagtctgaatctggatcatttatgtaacacatctccctctcccttcccctttccctgcccgttcctctcctgaagcctgtctctttagtgttgagaaatgtcacagggatgtcttttggcgtggagctaatggcatcctttgtgctggcacttggcagtcctttcggtgtacaaattcatgttggcctgttctatgaaatattctttaattattttttaacactgtttttcctttcattttcttttttattgtttttgtaactcctattatttggtgttattgtctagtttaaaaattttggggggctgggtgcggtagctcatgcttgtaatcccagcacattgggaggtcatagtgggtggatcacctgaggtcaggagttcgggaccagcctggccaacatagtgaaaccccgcctctactaaagatacaaaaattagctgggcgtgatggcagatgcctgtaatcctagctactcgggaggctgaggcaggagaatctcttaaacccaggaggcagaggctgcagtgagccaagatcccgccactgcactccagcctgggcaacagagtgaaactctgtcttaaaagaaagaaaaaaaaaatttgtcttttctttcctatttgtcaaactttgtaaaaacttcatcttgtaaataattggttgagatgttcttttctgctgtaataattttaatttccaagagcttctctttgttgttactttgtctctgcatcttccttttttatggcattctgttcttgcttcatggatgcaatattttcattgatctctcagaatgtttgatacttggttttgtttcattctgtttcacttttattcttcctgtattgtttctccttccgcaaagatggcttctgttgttttgttttcttctcttttgtatcatatgttttcctcaaatatttggtgatccttggctgactgattgtaatttgggagtgagacgcagaataactcaaggaggagcatggaagggattggtgagtgtggtcttacctgtgtggtgacttgaagaagccattttcttccgtttctttaggtcttttcttttgagttgttgagatctcccaggaaagactcttctaatttccagcttgctgagtgtaaattttggctgccaggttttgggagctaagaggaagaagacaagggagatttcaaatttagtgtgtaaactttgactcagcccccttgtttttggtttcctgcttctaactgaacctagtgtgttctagcctagatgccctgggtgttattctctccaagaacaaacctttaatctctgccagatggggaggtacagtcacccagctacctgggggaggggaaggggtcagggattcgaactgcttcttaaacagaattgcaatcagtccccttggacttagctccaccgttgtcctcactgcctgcaatatctggggccaccaactcttgagccttttgggggttttgaggtctgaacggtgttgtttgcagctttgcctatcactagcttgagactcatctttggatctgctaagtcagttactgctcacctgtcttggctccagctgttaaaatcctgttgcagtttcttcctctcccattttctctgtcgtcgtgagtttctgccatcttaaaaattctttattgtcattttattagggtttcaggagagagcagtgctccatgcatgtatttaatccactaactttaaccagaagtatttttttaaacatttggaaagcaggctgcgtgccgtgactaatgcctgtaatcctagcattttaggaggccaaggcaggcagatcacctgaggtcaggagttcaagacaaacctggccaacatggtgaaatcccatctgtactaaaaatataaaaattaaccaggcgtggtggcacaggcctgtagtctcagttacttggaaggctgaggcaggagaattgcttgaaccagggaggcagaggttgcacagagccaagattgcaccactgcactccagcctgggcagcagagcaagactctgtctcaagaaataaaaaataaaaatataaaaatataaagcattaaaaagtaccttcaagtttttttctttctttttttttttttttttttgagatggagtttcactcttgttgcccgggctagagtgcaatggcacgatctcggctcaccgcagtctccacctcccaggttcaagtgagtctcctgcctcagcctcccgagtagctgatattacaggtgctcgccaccacgcctggctaattttttgtatttatagtagagatgggatttcaccatcttggccaggctggtttcgaactcctgacctcaggtgatcacaccctccttggcctcccaaagtgctaggattacaggactgagccatcacgcccagccaaggtgttttcttagtaggtgaaattactgagttagaagcatttattcaggacctactccttcttaaacaaagtcattgttttgtttcttcattcgcctatgtctgcaatattatagagctagttcaaaagtaagcagtttgattttggctccaacattgagcaatcataatgtaatactaggttcaaatgtgagtagatttgagtgcatgtcgatgttgaaaataaactcactattggagtgttttaggatgctctggctttccaggatggatattacttaggagtaggttggctctgggttttttcctgggttcttgatttgcttgatttggttcttatataatctattctttctttccctttccttctccagaaacagctcaaattatgaaataactttcaaaaacaagttaggtggtagtagtggaggtagtgaaggaaaacagggaactttcctgttcgctgcagagcaaaccaggtgccacgtagaccttctcagatgccactactggacgcagccctctagacctgaaggtatgctggatagacccggatagacccggcggggtgctgagcccaagcgtgtgccagggtgggaggatttacacttcagaaactggcagatgctatgaaatcagaaccttttttcctggcaagctggtatttaaatcttaaccagcatgcttctgtctagacctgactttactcttggggcaatctgatataccccccaaagtgtcataatcacgtcagcctacccgtatgacattgtatttattcactgcactgtgagctccagggagtccaggtgatagaataggcaaagggcaaaatttggagccagacagcctgacatttacatccttccttggctacttctagctctgtgacctttggcaaacctctgaaagcctcggcttcagtttcttaatctgtagaacagggggggaaatttcttcctagcgatggtgttgtaaaaaattcacaactgtggcagcctctgctctcccaaaaccatgtcctctagaaaatcctggctttatggagtaggttcctctgtggcctgtttctgtttggcagcaggcttgtgacgtctttgcttagggtccttatttttataacagaatactgactttttgtttatatggtttccaaaatttatgaagccactaatcaaaaacatgggatcagtgtacttcagactcttacaagggaatataatgttagacagacttctctccggtgctccaaatcccacaagaggaacagttttgttaaggggcagtcatttaaaggatgactcacaaattatctgtctattctaagttatacctttgaataaaattaaaataccaaataaaatatgtatgcattgggacaacatcaacataatcatttttataatcactcaaaactgtgtcttaatcatatggcttcaaacctttattgcaaattattataagaaatgctgtctctactaaaagtacaaaaattagccaggagtggtgacaggcgcctgtaatcccagctactcaggaggctgaggcaggagaatcgcttgaacccgggagacagaggttgcagtgagctgagatggcgccactgcattcctgggcaacgacaacagtgaaactccatctcaaaaaaaaaacaaaaaacaaaaaaaaaacaacaactatttgacttttgctttagcgtctgctatgaaccatgaatatagatgccaattatccattacatggttcagttttcctggcttacactgccctacacaagacatctgtccttgacacagggactaaccttgtctctcctaaggaattagtcatttttatcctcttagtaaggagttgtgaaatacatgatgtttccctatgcacctccgtgccaggaatgttagaatcaagttttgttatcaatcataagaactgtctaagattttcatttgacatgctacatttctactcctttttttttttttttggaaagggtttcactttgttgcccaggctggagtgcagtggcacaatcacagctcactgtagcctctaccaccctaggctcaagcaatcctcacaccacagcctcccgagtagctgggactataggcatgcgccaccacgcccagctaatttttgtattttttgtacagataggagttttgccacactgcccaggctggtagatttctcctcttgatcctgttttccacatgttcatttttttttttctttttttgagacagagtttcactcttattgcccaggctggggtgcaatggcatgatcccagtttaccgcatcctccacttcctgggttcaagcaattctcctgcctcagcctcccaagtagctgggattacaggcatgcaccaccacacccagctaatttttgtattattagtagaaatggtgtttcaccatgttggtcaggctggtatcgaactcccgacctcaggtgatccaccctcctccgcctcccaaagtgctgggattacaggcatgatccactgcgcctggcccacatgttcatttctagcttgttaactttattgtatttaccatactctcccactttttaaactacagattccttgtagaaaaatgaataaatgaatgaatgagtgaaggaaagtcagtggcaataactaatgatgtttttaaaattgtgtagtaagtggcatagttatgagatttgggggatttggggctggatcagacagagaaaacagaaggggaacatgccagtgtcttcaaatgtttgagacactgtagtttggaagagacagcggacatgatttttattgctcctgagaatagaataggagccaatgaatagactatccattaattgatttgttcatttctaagttatttcttatgcacctgctctctagggcatgtggacgaggtccagatgaggacaagtttcctgctctcaaatttcttgcattttagggaagtaatttttggctgacttgcaaagaactttctaatgagaagagttatataaccatgggatgtgttgccttgtgaagtagggagctttccatctttggagaatctcaaaaagggctgaatgaataccctgaaaaatactactccctcgggagagaaggtggatttgttgacctctagggtttggctctactgtgcttccatgtttctcttttatttgtcagtttccatcttaaactgaaggattaggtcatttcagggagttctggaggtgaggtggtgggaagcaataaaaataccttcacaaaccagttcctttactctttgatccaggtggttcccacaggtcccttgacccccgataaagtaatcccggctgcctgcgacggaggtgtaggcagccagggttcatggagcctgtggttatctccttacagagagccttatcagcttgtggagccaccgtaaagcttgctttgacctttggcagagactcctcctgtatgtctgtccacagaaatgagagcaggtgacagacacctgggatgatcctgagacccagcacccaaagcccaggcttctttctatggggaagtcaagcagagggacccaagctcatagccagtggaggggtgggttgatgagaggcgagccctttaccagatgtgagcccagtcatcactctgcattttctacgcaaaagtccaggggcttgctattgaaattaggcaaagaggacaaagaattgccctctgtaaagtcctcaaaaaattataaattataatttttataaaatgatagaattctaaaataaaatttttataaaattataaattttatatatatataatttcctggaaataacttacagaaaagttgcaagaataaaaatagtacaaaggacacccttattcactgtactccgttagcaattaactattttttctggaccatttgtgagtaagatgcgtataccattagcctttatcctgaagctcttcgatgcatatttcctgggaaatgagatatgctgtcacgtagccagagtacacttatcagcttcagtaaaattaacattgatgagtacccttatggaatctatcatgcatgttccaatttgttttcagttgacctgataatgtcctttacagcattgtctccctccagtgaggggtccagtctaggatcagattgcatttcgttgtcgtgtctctttttgagggtcttttaactgtaccattattattgttatctgtcatcttattagcttattcaaagttgttagaggtatttcttatttagggtacatctcatttacaatcatcctttcgttcacttgaaaatgaaggctaggttctctggagtccagactcactccccttctatgtgaagtgttttcctgtgtatggtggaagggatgggggtgagaaattttggatgtacattatgtacatggttgacttttctttgtttgatttaaatcatacaaaaacagatcagatcctttgagatcattttcaaattccgctgttgtcaatccgacttattgccaaggagatcgtcccttcatccttgaggaggaagaaaggatcattttgagaatcttcgtttcatatcaagacaacacactcttctgaatctagaaacagaaatacctttacatttacttacagcccttatctcagcactttcatgcatcttatgagaagcaacacgcatgataattaagcatttctatgcatgcagagctttggttagcttggtaaagggtatgttcagcaattctggtccctgccctccagaaaaacttgcttaagatgcaccaatatgcattattaaatataataacacatcaagtaaaaactatgcctaacactcgcaggctatcatacagacttagaattattgagatgatttttcagatggtaacatttaatcacagagaagctgaataatttgccgaagtttactttaaaaaaaatcagagctacgataccaatgttcagtacctttctttcttagtataatcccctactttcaaaataacctttatagatatttctagtatctacgctaagaaaaagagtaatggtgaaagactgagagaagacactgctttttaaaggctatagaaatctggtacatggcttctttgaagaaaaaaaattaaatggaaggaaaattggctgctcattttctgagggtgcaattttatatagaagatatttcactgtggtctgtatttaacaagctgcggggaccctaaggctggtagatggtcagactggtaacattttctaatgtgactctgataattttgacataggctttctttttggctgccctaagtatttatccttttcacctgatttactttacattcgcctattttaccatgggttacagacaagaacaaattggactcttaaaatggcatataattttaatattttctgagtttctagtattctaaattcataattataacctgagggatgtatgcccacagggcataaaacaatcacatagatagtgagttttttttttttttttttgaaattaccttggctacttgaggattctctacacccctgctatccagcatgggggccaccagccacatggggctactgagcattgagacgtggctagtctgaactgaatgtgactggtctgtataaaatacatattagagttcaaagacttggtacattaaaaagaatgtaaaatatctcattagtagacttttttatattgattacatgttgaaatgataatattttggatatgcagggttaaatgaaatgttattaaagttaatttcacctgtttctttttaattttttgatgtggctactagaaaaccccaaattccatatgtggtttgcatttgtggctcccattatatttctgttggaaagctcagctctagaaggaaagaaaatacataaaaaaagaccaaaaaaaacccaactcattcagtgtattttagagtgaattacggaagggaaagctgaatagccaatgatcccattttttttcttgattaggtttggagttcattaaagcttctttaattaaatatattgtaaatctgcttcaagttcccagttgagatgagaattgaatctttttgtttaattttaaaaattctaagaaaatcctgaactcacttcaaaagcgacttgttttttgaaatctttgtaaaaagctttccatttacatggattggaggtctgattaatatagagttttgaaggggctaaagaggtgtgaaaattatccagaaacttctgaaaggacctttcttatctcacaggcatccagggagacataagggcccttagaagccgcagatcagccataagcatctgtgttcacagtttccttccaataagcaaaaacactgggagagataacatatttattcctaggtgtctataactgaatttatgggtgtaacttgctggatattattgcccttgtaaacccatgtaactgcacacgtaaagcatgtttttattagttcctacataaaatttttatgataatggcaaacaaaggaccaatttagtttagctgagtttgttcttattactccagcttccaatagataagcaacagtgcaaacagcaggctgggcgcggtggctcacgcctgtaatcccagcagtttgggaggccgaggcgggcggattgcttgaggtcaggagttcgagaccagcctggccaacatggtgaaaccccatctctagtaaaaatacaaaaaattatctgggcgtggtggcacatgcctataatcccagctactcaggaggctgaggcatgagaattgcttgaactcgggaggcggaggttgcagtgagcctagatagagccattgcactccagcctgggagacagagcgagattccatctccaaacaaacaaacaaacaaagaaacacacacacacaaaaacaccaccaaaaaaaacccccgaaacagcaacaacaacaacaaaaaaaacaccccactgcaaatagcagcagtcaacagggaagagagagtcagtgcttgcagggctggggctcctggcctgtgggtaaggaggattgaggctcccctaggcctcatgggactgcagtagggtgaggctgggctggcctgccctcagcttgcaagcctgttgttgagcagctgttctccacgttggtagctgtggagtattctaatttagcttctgaaaaggcttgcatagctagtattgaaagaactcccacttactgtatttcagctggagaattacagagaaaaaaggttcaagtggcttattgtaggtcatctcccactctgggatttaaacaaagcacaaacagaacaaagttcctttaaactgggtgccttcatctgagtccctcctgtctgcaaggtttggcaggctcgctggatacagagcccacgcctctcattctcactgctgcctttttatgtttgacccttggatgtggccaacgattcccatggtgacctggattggagggaagtttttctagaatttgaagataaagcatctttcataaatactgcctgttccttcccaatgactagttaaaaattgatagtctgtaaactagagtgagtgcgatccgtgaacccaaattcaggagacagagtttgacgtgtctaaatgtacgcaggggacaatagcaagaaatattttaagctgaatgagcctgaaatataaaagacataggattgttatagatatgtcatactgaaggctgccttggatggaaaatcaactgaaaaaagggcaagcttagtacacactaggtttattctgggctaaggccggtctaggacattcatgaaattacaacttagtgattaggggctatagtggtttagattctagactttagaagtatttacacatcaaaaaactcatggctgcgaagagttttcctcctagcatctgacacaactcctcattttgtaagtctgtactggagtgaattctagacagctggcttgttgtatttatttttatttttagaaatggggtctcactctgttgcccatgctggagtgcagaggtgcaatcgtagctcactgtggccttgaactcctgggctcaaatgatcctcctgcctcagcctccccagtagctgggactacaggtgtgcaccaccatgtctggctaatttttaaaaaaattttttgtagagatggggtcttgctatgctgcccaggctggacttgaactcctaggctcaagtgatcctcctgcctcagcctcccaagtagttgggactacagggacacaccaccctgccgagcttgactagttatattgttcttaaaggtttatagaaggaaggagcttctgtagcctccaaccccatttttcggatgcgttcctttaaggactaatccaatttgaggttctttattctatttcctcagtgggcatgtttactgatcctcaaatgtgcctttatatatttcataagctgtttctttgcattctttcccccaaaggagtagtttccattctttctgaaaaacactgcttgagcctcgtcccttttggaagagcagttctggggtgtgtgtgtgtgcgcgcgcatgtgtgtgtgtccacgtgcatgcgtgtgtgtgcatggggggtgtgtgtctgcatgcctgtgtgtgtccacgtgtgtgtgtttctttggcctcctctcaggctctgggggaaaaaaacctctactaaatcttaagctaagtacaaaatgtgtgcatgtttcactcttgccaacgttttagacttctggtgttaagccctgtggaaatgcaaatagcatagtttttaatacttactctaagggtactatttagggaagtaaaagttactctaaaggcaagattgatttcctgccctcatggaactgacctttcataatagatagcttgttgtccatgctaacaagggcttactacaagtgctacgtattctcaatttgtatcaaaaattgtagtttggggccactggcttctttttggagatggcctgattgattccagactctggatctgagaagctgacggttttgtaccattgccctacacacatggaaacactgcagacttcaaagttcctttgttttaagtgcggtggaatcatagttgaggggacagtgaaggaagaggacagactgagctgaggtgttgttgctgctttctctcaaaaggttgttaagagatcattcatttttgaggaattgcaacaagactgatttttttttttttttataaagcgtagagtcttttaactcaggattagatgaatagcttttcaaatgtgtatgaaagacaagaatcccaaaagattggctctattttaaatagcagactccagggactcaaggtttgtaacaaaagggcagatatggaagagatgaactcccgggtccaactctgagaatagagcaccctcagggctggggatccctgaggtgtcagggaatgccaatctcgctggttccggtttattagctcggggaatctcgttagatatcctcacaataagctagttggtattgactttgcctgacccatattataaagttctaacaagtggaaagtatagccaagctttgggaaatgccatagcatgcagaatagaagagaaaaccagcgtcttaaatgaacagaggagaaatttgagcagaaccaccaactggagaaattaggacactggctggaatgttacagccacaacaggggaaaaaagcagaatatttacttagtgaagacataatgagatggtacaattctctggtgtcaactttcacagaagagctttgtctctgtgctaatgatgcagagagcagggaagtgatgagaaaattgtatagacctcaagaaatccaacaacagcaaaaaaagaatttggagtttagttttgtatcttctgaggtccaggatttttccatctccctaaatttgagaattcaggttcaaggaaggacttggagaatagtcaaaacattactacacttcttaaagcattcttaatggtatttttactagtgaaatagaaaatgaaaacacacacatgtaaataagcatattttattaatcctccaaatgccctgggtaaaccagtttagaaaaccatcagatgcaaagtctgtcatgggtctggtgacgagattaggatcagtcctaattaggattaatgaaacagagtttcccgggaagcaactgtgacaagctgttctttgaattctggacatgtaggaatgatgtgaaagtctagatgatcagcctcatggagtaagggatccgaacctccaaagggaataggcagaagaacaatttcaaatatcttcataagatcagcccacaaatgtttgcctacccgtgtgcaggtttgcaattagaggctttagagcattggttttgattcttaagccatttttatttgaggagaaagatgcctgagagtgtttttagttaatattccttatggcaaatctgtgattttgcaactaggatgcagagaggttaattgactttattaaggtcccacagctggtcatttgggtagaactgagcccctggcttatggctaacctacagagactctccctctctgtatttctaggattttcagtcatttcagagttctgctgtcctattgatgttgttttttttttttgtatgcatgaataagtgctgcaattaacgggctgtggcgtgaactaggggtgtgaatcaggatcactcatcccaccaagttgggcttctgtgtcttcatgtttccacatggaacttggcctggaatagatctaagggcttttccagctccatttttaaaaattgcttactgaattgtgtaggatttggtatttctgcagttggcaaacagaatacaaggtttggtgtcaagtcgaaactggaaccatgtaagccattgcattactctggaacaatcagctgactctgaaacaattcttgttcaccaatgacagtttgggaattttttcccagtttggtagggaatttcttttttgtcatttttgatatgtttgtatgtttttgcacaaaggccactcaaaggttaagtcggggcattttttagagatgtaatgggaatatctgtaaatggtcctgctttagactggattatgactttaggaagcacagggcacgttcagccgcatggccctccagtcatcctatgtgcagtctcacacgttccccactctggggaaattgaggcaaagagaggggagatgagtcgcccatagcctcccttgttgctcccaccaagccaggcccagaattagttcctaacacttaatgtaacgtttaccaggggcctgatgcctgacacaccctttgctaggcactaggattacagtgacaagttaatttggtccagcctgtctccaatttgggcatctccttcgtggctgtggtatggagtggctcagggtataatgcactgctggttgccttgaaagtttcccaagcattagccaagacttaggtgaagaacttggacatggaggtgacgtaggccctgggaagggactgcctaaagatgtatgttcatgggctccacagacaagaaagacatggcagattaaacatggatagaaaagggcatgatgtgtattagaattaaatgctgcagcagttccagctaatctaatttcagtctcttaatctcattgtctttccccttggcagcataactaataaacaatgccactctgcaacagttacataaagcacgtattcaatagtcaaaaattccaagctcttttcttcaaaggttaggtctattttttattttattttattacttattattatttttttgagacagagtcttgccctgtcacccaggctggagtgtagtggtgcgatctcggctcactgcagcttctgcctcccgggttcaagtgattcttctgcctcagcctcctgagtagctgggactacaggtgcgcaccaccacgcctggctaatttttgtatttttagtagagacaaggttttaccatgttggccaggctggtcttgaacccctgacctcaagtgatctgcctgccttggcctcccaaagtgctgggatgacaggtgtaagccactgtgcccggcccaggtctattttttaaatggataaaagaaagagggtggctcaattttgtgacagggtctttaaatttgtcagtttgtgcatttcatcttctggtgccccagagctctgagtgtagctgaaactcatgcccggtatggggaagaaccggggcagggtggggccctttagcctctgggtttggtttctcctctcctggaacctgtattcctatgattacttgccccatattccagagaattccagctctgcagctgtggctgtcgcatctcacactcaaactgactgagatgaacaattactggttttctctccccgcttcccatctctttgtgtacattgctttttgtttttctcttttttcttccttctcccatttctctctttttctttttgttcttttttctctctttgttccttgtttgccctttcttccccgaatccagcaatttgtcttactaccactatattgaattatgtataagccgaagcatcttagttcattcaataaagctttctgtaccctattcaccatgttaaaaatcaagtgaaaacaaagttttatcccttaaaaacaaacaaaactccaacaaccccaacccaactaaattaagtccattcctatttgtatacatctgttaattaatgtatgaattaatgtatttattagataaattccatatccagacacatcctatactggtaatactaaggagaacagacacagtccctaaggtcctaaggttgactatttacttggggagagagactgacaacaggcagttacaaagcaagacatgctgtaggccctgggattgcatggacagtgtccactgtcagtggagtcctgtggagggggtggcgctgatcattcagtgcggggaacaagtggtcaagacatgcttcctggggcactggctcttggttgactatttgggagtgagaaacagtggtagcctttgcccaatagaagagccgcccccaggtgattctgtacataggagctggcctaggagtagcctctggcctgaccctgacatcagggttgagttgattagggttgtgattccatcttgactactcagtctgaatttgctgagttgcaaattgaaagtgaaatcaattacatccagattcagaccatttgattttattttcatttgatcataaacatcacaaaacacgggatagagagagcctattgtgctcagttattcaaataatcctaattatgatcactcattcaaatgattcttaaatgattctttttttttttttttttttttttgaaacacagtcttgctctgtcacctaggctggagtgcagtggtgcgatctcagctcactgcaacctccgcctcctgggttcaagcaatcctcctgtctcagcctcctgagtagctgggcttataggcacacgccaccatgcctggctaatttttgtatttttagtagagacggggtttcaccatattggtcaggctggtcttgaactcctgacctcaggtgatccacccgcctcggcctcccaaagtgttggaattaccagcgtgagccaccgcgtccggccccaaatgattcttttttttaaaatacaatcttttgctgttagcacattttctgaagagggtggctctacttgagccgtacattctctggatgatgtgggcctgagctgcccaatatgaactcaagagtagcgagaaaccaagcccacaggccttatctgctccagggcttttccacctggcagacggaattgaagctcttactcgatcgcagttgtgcctgcttcacagggttgttgtcagtattaaatgtgtcaatacaaataaagctctcagaacagaagcccgctcatggtaagtgctcaaaagtggcaatggtgataatgatgatctatgagcccacctgtttcacatcctcaaaggcctctgaggctgaagctgatctcatcatgtcaactggactccttgtttcattatacaccctgactatgtcgctgaaaacaccccccaaaacatcactgaggaataagtattgagatccagcatacctgcaaggtgaattcacatgcatatgtgcaaaactgcaagcttcatggtgggaccatatcacctcttctaggagactctttttaaaaagcttgatctctatcttaagccacacatgttggaactaagaaatctaagggaggaaccccagatagagatgcagttggccctttgctgaatctcggtccttcctggagcaggcgggcagccctgcccctttatcttctggcaatacaaaggataaaagaaaacagttatcaggtgctgaggggccagatctgagccccgataatgggaatcctgaaacatgagcagcctcttctgtttgcagagtctcatcatgcaaggcagagtgctggaggtagggctataaattgagggtgaaggaaaggcagccctcctaggccctgcgtatcgccagttgtggaattctcttttgcaagaggtcactgagtcaaatgctgtggatggataattttatggccactaataaaatttatagccaaagcaagctaagataataagagtaatcaaacgtccagccctgggacataagaatcccatcctggcctggggtgctggctgggggtgctggacagcacagagaggagtttatctgtctgactcaaggccagcctcagagtctcagaggtgatttgtgtccacatgaactgcgaggactaggccaggtctggggcaagcttcagcttgggcagtaactgctgtttctctgcagacagcatgccaacagcagcaggaaaaagctatatcctatttaaatgcctaaaagcaaatcgtgagcctaagaaaagatctgaaccaccccagctctggaatactacattatggaaggaatgctaactggtcattcacgtgtgacttgccaggtgtgagggaagataaagaaggatgcaagtattactcatgcaagtataaagaaatcagatgacgtttaaccaaagagttgggtttgtgtgggggctttcccctgcccatctcctccctcttctccgagcttagctcctctctgagtttccttcccatcccagttcttcctcctgtaggcctggggcataggcaaagtgggatcttgtcactgaggccaccctgcagaacacacctcgtgacatctatagaggcatatcagtcactggaagacagaaaccctgggttcttggccctcttctcttgactcgggcctcaccgttgatggtccttatgaccacactctctaaaatggcacagcaggtaggtagccacgtggaacaagttgagaacaagtaacactctggtgttgtgggattctctctctctctctcttattttttgagacagggtctcgctctgtcacccaagctggagtgcagtggcacaatcatagctcactgtagcccccaaccacccaagctcaagagatcctcccacctcagcctcccgagtagctggaattacaggcgcgtgccaccatgcctgcctaatttttgtatttttggtagagacagggtttcaccatgttacccagcctggtcttgaactcctgagctcaagcaatctgtctgcctcggccccccaaaggcttgagccaccccacctggccttctttctttttttattgtggtaaaatatatataacctaaaatttaccatcttcaccatttttaagcatgcagttctgtgacattaagtatattcacattgttacacaaccatcaccaccatctaccaccaaaagaactttttcatcttcccaaactgtaactctgcccccgttaacaataactctatgaatttgactattttaggtacttcagataggtggaatcatacaatatttgctcttctgtattatttttaaataaaaactcttttgatgagataggtcagagaaaatccattttattgccctagtttttagtacattttattcaaacaagaacccagcaatagttaacttgctgcaatgtctactgagacgtctaaaccaaaacatgtcttgctgatgccagcttttgccctcttcacaaatcctgcttaggaaaggttcatgacactgccacagtaggcctgaccctgccagggaaaggcatcaccgcggttctgggtagctctggtgtgcgcgaagaaaagagacaagcagggtgagagtgaagtctaaatggatcaacaagtttgcctgataccttggagtcaggaagcacgggaagaaagagttgagtggaatagcttagtgaggtctgaggcctgcctgatccagaggagacactgacaaacacagacgctgcagaagaggaagccgtcccaggttaggaggcatcccagtgcttccctcctcagtgagtcatttcatctgtttctctgcctgcaaggaagaaataaacataactcataaaatgaagcatttcacctcgccgggggagtggcattgaagtgagaggcatgcatctgtgggtgtcagagcaagagtcctctgtagctgcttgtccttgacctggaaggaagggtctggtggggtgacaaagtgacatctgctccttagagggagcctgttcttggagacccctctgccagatacatttttatagtcagctccagaagtgacttgatgtggggattgagacatattcctgcagtcaaagactcatacatagaaagggacataatttttttttctttctctctcttatgagcaaagactgaataaggcttatgtggactctatcactgcatcgtgatgactggagtaaggtgccctccgtccatcatcgtcagctttctattctgtgtctgactgcagtggaacatcggcgtgatcaactctacattatttaactttgatccgggcgtgcattgtttgatcttttcctttgcagattgactttcataatttatattttatagaatacacagaaatgtattctggcatattctaagagcataacggctgacagcatagacacatcctaagacaatactaagggtttacaaattagctgtggatggtcttttccaagataattgtgagttgatttgtgctaacctggatcagaaatatttatcaagcactcactgtttacaaaactataaaagcattaagtaacagtgtaagtagcagatagcaataaaagatgtcccaaggcagtgagatattaattgtgtaagagaaaatgttattaaatgttattttctgggatttgaggagggggagcctgtcattaaatgtcattaattaaagactgagtaggaagcaattgctctccgtagatgtctctacacaggaaacggatactgtttggtgttccctgctgtcttggcagagtcagagggaggtagctttctgggtcaataatgccgtttaagatgaacgcccatgctgacacactctggtagctctcagagtccttccttcagtgtagaagttaaaggtcagcagcttacagattgcaatttgcattgtggaagcaaccttaggaagagccacacgtcttttatcttgattctgtggtcaagatggtaaccacatttgggattctctctttctttgggattctctctttctttgggaatgagtaccaagctcctcatactgaggtatcagtgtagacatttaaatgtggttgaaagacgtgaattaaaagttaaaatagaaggagaagctttatttcgatgtggcctgtgaaaagcagactttcactgctcgttaatggtgcacggaattctcatggacgttgagaatgtcacatgtacacgcacatgcacacgtgtcgacacctgcgcagacacacatgtgcaccctctccctgcagcctggccccttttgctgccacctgtattcattttcccaccaccccgagggatatgatgtgctgtttggaaagtaacagatatccttaaggagtgaaatggtcccctgtaatcaagatggagagctaaaaacaggtttcaatcagaactaaaccaaataaaatcccgtggtgaaaatttagttccccttaaagcttgtgattaggaccaccccgtgtgttttcggccactgcttttagacggtgacagtgacacatacacgtaacgaagataatgaggcctttccactagcactgtagggttttcaaacatgttagatggatatttggaggttttctcaggaagaatcatgtatctttcacagtatcgcaagagaagaaataaattcctaagagtctaacacgcagatgtaagccatagtcctttaaaaataaggctcttggccaggtgcggtggctcacgcctgtaatcctagcactttgggaggctgaggtggatggatcacaaggtcaggagtttgagaccagcctagtcaatatggtgaaaccctgtctctactaaaaaaatagaaaaattagctgggcatggtggcgtccacctgtaatcccagctactcaggaggctgaggcgggagaatcgcttgaacccggaaggcggaggttgcagtgagccgagattgcaccactgcactccagcctgggtgacagaacaagactccatctcaaaaataaataaataaataacaaaagtaaggctcttgattcagaattatgcagtgaggctcaagtttcaggagaacatcttctaatagtggactgcagggaggggctctgagggcagcctcgagttaggaagtggtcctgaaggggagagtggagggagggagatggaactgaggcctgacatgctgcacagaagccacctcagccgaatggatcagcatcccaaccgtggctcctcctcctactagctgatttcccttggggaaggagctcaacctctctgaccctcagttccctctttggtgaaagggttgaattgtcttggaatccacaggtgaccacctcaggactgcagtgagggatctgtatgcatccagtaaagcctgtccttagctctgtcttgtggctgcccacctggcctgggggccagagatggggctggagaaggggcaggcttcctccgggagctcatccccacacccagtggagttagcgtagccaaggcttccagcagagttttacatccagagtcatctttgttataggtagcagcaagaagcagtctctcctgggaagacttgctttgaagtgtggggagtcgcactgacttgtaggaaaggccactgccttgagatgaaattccaaagccaagaggaaaagtgctgttgaggaggtgggatgggaggtcaactcctcaagtccctcaaggaattcagtggaagccactcctgagaaccggctggaggtgggaagcctgaagaatgagggagttcacggtaggggcctgaggtgcgtgaggcttgtttgtgttggtctgagcagggctgaagccgtgggcccagggcctctttccttcagaaacagtcggaagtgaccaagcttcagctcctcctcctccccaggcctcggcacccaggcccggtgctgcggggctcacgtatgggaactgagaaagggaatatggagtcttccttctaggccccacagaggcctctttgacctcaagacttggctagaaacacattttggaagcttccgcatttccaagtcacagataatatttctacacacacacagacacacgctcttattttagagaagggacagaacatttgtctctggctgactacaagtttctttatctaccttcctttcaaatctcctgaggacagagactaagcaaagtttaccttttgtaatcccccaagtctgtctggtgctcaggttattcagtaaacttcagtaactgaggtcagatggtagaaggaaggggaaaaaaacgggaatcagaggcctgtgtttccagctcaacttccctacttgacggctgagtggctttggaccaatcatcggactcctctcctcgcctctgttttctcatctgtgaagtggaaacaatagccaaccagtctacataacttaatgttgtttccaatgtgccttctatgaggaaggagaggttatcagcagcaaagggatagacacatctgagggcatcccttatgctgttaatgactgtttaattgtcatagaatatggatcactgccattctttgcttgacataaaaacaactcagagacacactgtcaccgtttcagagagcttcagaaagaatttggattggagtgcttctttcatagccagatctcatgtagtaggtcattattttgtttctttgattaataggacaattcggttacaaccgaaggtactgtaaccctgcaaccctagagaggatttgcagggctgaggaagagtaaattcctattagcaagtatcttggtggcaagcaagatggcaccttggtaagaagttatccatccaactcagcactccaaagacctgcataccagtgtatgcgggaaaaaccatagccggtctaacagggaggcgccttctcgctcagaatcatctacaatggatatgattgtaattgttgaagaagctacagctgcttctactgagagcaagcctcgctcttctgtttttcagaattataaaaatggagctaaacagagataatggaagttgcttttggagcactatcttgcagactgtctttgcacaagatattgacaggaaatgtctgcacgtttcttagagcctcctgaatcttcagcatctacttttttttttttttttgcctgacatataccaagcacccaacacatggttgttcatacgaatgaatgaacaaatgaactagtagactaaaaaagaggcagctcttgatccccaaacattgtggagccaaaacactatcctttgacagtgatgaggatgggagaaaagactgtcatatcttaagaattaaacaaaataggccaggcgcggtggctcacgcctgtaatcccagcactttgggaggctgaggtgggcggatcacctgaggtcgggagttcgagatcagcctggctaccatggagaaaccccgtctctagtaaaaatacaaaaaaaaaaaaaaaaagttagccaggcacaggggcgcatgcctgtaatcccagctactctggaggctgaggtaggagaatctcttgaacccggaaggcggaggttgcagtgagctgagatcacgccattgcactccagcctgggcaacaagagcgaaactctgtctcaaaaaaaaaaaaaaaaaaagaatcaaacaaaatagaaaagcaatgaaatgttttaaagaaatgactcttacttaaaagacttaagaaaatttacgtagatacacgtgagcagtagaaagtaagaatagctcagatttatttcacaaacatgttttgagcatctttgtgtgccagccattgtattgaccttggtatacagtggtgagcaaaccagccttagacctagagacctggggcttttgtgtagtgggggaaaatgacttactattaaatgcatgatatgaaccgaagtggagatactgagggaaaagattgaggctctgtaaaagcatccagcagaggaagcataggctggaagaaggcttctcggaggaagtgaggcttgagcttacatctgcaggaaaagtgggagcattccatatggagagcaaaggccccacggcagaaggagcaggaggtgtgtttgaggaccttgcccgaggctggagccctggagtgtgaaactgagggggaggtaaattagcagttcctgtagccaaatcctggtctgttatttctgaaagtctgtcatctctgaagaggatactgggcataaatacaaatgagaacatgatcttttaggtggtgagagtctatagagcaggcatttggagggatgccctctccccattgtggaactagcagaacaaaatctaaagaatgcacaaaagaaaccaaaaaatgagctgttaggttctaaggagggagggagtgtgatggaaagcacaccatgagaaataaggacatggacctgcccccgccccatcatgacactggctgtgtctgaaaaatggagcaggaaaggcagcgtgactaggaaaatgtgcagttttaattttacataatatttgtttttttttagaaaatattttctaagataaaaaatgctaacatttgtgaatagtggtagtggatacatgtgtatgttttattattggatttttttctatatatcacatttttttaattagaaggggaagacttttttttttcttaaattagaagaggggcagttaaaggaaggaggtaggtgctaggaatggtttaagagtcagggtcctattcctagatacaaattggcttgggcaaattgcttctctggtcttcaggtgtcttatctaaggagaagagttttgaagatgatgatgttggaaatcccttctagctctagaacgttctgtgatcctgatttttaaaaacaattgatgattgaatagttctatttataggcttgggaatttggtgtctcatgctcactaatccctgattctttaaaattaggagaaacaatcttgcttggcacaagatagccaatagctttctagtcaggaagctcgtgcattgaaattcatttgcccagagacattttcaaaagctgtgaacccacaggtcgctgacatcccttctggaccagatgtgggaatctggacccacccagaaagctgtgcctctgtgtcaggcatcctgccattcaccacacgcgttccagcggctgctctctggctttgcagggcacctgcaggacagtttgtgcataaggaatcccttccctccaaattttagatgagaaatatggtaatgaaaggaaataacccaggcagagtggcttgtttcacatgtcacggtgtgtcaaaatcagatgtatgtcttagattcttgggggaaaaaaaaagttgtcgcatgaatttgggggttttgttttgtctttggacatggtccgggaggcatgatgcgcgccctggagcttcatcgatgctgttgagtggggatgacggtgtgcatcgccacatcctcagctttccagttgtttcagctgcgccctccaagctgccctgttccgcggggacaatagcagccagtggacgggagcccgcaccacacagcagcaaaggaagccggaggagaggctctgcgggctctctgctccgtcagcaggaatgtcctccgggccagcagctgcctttgcagccacctctccagtttctgtcacttgggtcaagtttccttataatgcgttaaatgaatgagaataagaaagtgtgtgttggcagaatttccgttgaataatgccaaggctttccaagtaagagcatgaatttaagcggagcaaagttcccagtcaatgggattcagagtaatggctattctgctaataatgaaaagtagaaatgtttttacttttaaaggttcacaaatgggctactcttagggctcgctggcctattcagttacaaagtggaaactgttccggatctttgctttattgcacttgtatttagtaggtgattggaaacattttccacttagcatttaagggtttgaatagactggtgactttttttcaactaaagtttcctcttttttaaaaaactgacatttttctttttttgcaagtagactgaagatttcaagtaacaggttttccaaatacttagactctgcctgcataattattatatttgccgtggggattagcacttttcaaaagtgtatttctacacaacatccttgttttgccccaaagtttgattcttcacagcttattacgtagatttaggcaaaatggaccgagctccatccactagaacttccattataaaggcaatcatttcgaatgaaacagaagccatttatcttaatgaaccagcaggaaaatgaagtctgttgaaatgatctgaacccttcaaaaaatattggtaattcattgtggctatatttatttttattagtttctctatgttgcctgttttattgactttccacagcaaaccaccacccccaccagcaccaccaaataccgttgtattttgattccttatgttctttattagcaggcttacttctctcttcatagaactatgcctttgccccactgctccatttcagagcattcggggctattcctggtaagaagccagcattagttaatgttactgttctggtcttgggctgcaaagagtgcatggataatggttcatgttttcccctccaaatggagggaagacacagacataattgaaacttacaatgtcgggggataattttataccattatttttaatgaaaacggggaagtatcctagctaaaatgctggaaaatagccttccagtagccctaagcatccacgtgtaactgaatgcaggtgggatagaaacctgttccctcttgcctccctcccccaaatagagagatgctgtcagtggtcaggaaaagcagtgagccacaggtaatgagctccgtatccattttctttgtcagatctcccagctgatgacagagagtagccgggagggactaacagaagcagtgctgaaccgctacaatgcagacaagccttccgcctgcagtgtcccagcctcgcagggctcctgcgtggccagcgagacttccacaggcacatcggtggccgcctccttctttgcacggtaagagagctgttcagatccttggttctttccgatgagcccagctggttagcccctcacgtggactagctcagctgaaacactagaaagagtttggggccgttctgtgatgtcattcattaagacagagtttctcagccatggcactgtgacctctcgggccagctaactgtggtggggactgtcctgtgtgttatagggtgggctgcagcatccttggcctgtacccctcgatgtgtgcccgcagtaccctcctccagtcgtgactaccaaaaatgtctgcagacattgtgagaggccccagggtcgagagtcgctgctctcttgatgtgtagctccaaagatgctcttttgcagcatcaggactttgtagaggcatccctctggtgggtgtttccagatttatcttctcattacagaaattgaactgcttaaaagctattaaatagatggcaggttttctcccccgcttcttgacagattagccagagtgttatcaaatactctccagctaatcttgggaacttcaaaaatacaagaaacaaaaaagaaaggtatttcaacaatgttttctgcctaattttagcaacatggcagagacggggcgggagacgaaggacagctgagcaggaaaggacttcagggattgtctggttccatctccttatttatgaatgaggaaaccgaggaccaggaaggttcaactaggagtgagtttatagcacagccagaaatagaaaccggattgctctacatttttctgtataactcatgttttaatttaatgctcagaactgaaccttggaaaactttctctgtctaagatttgcaagctcctgagtaaacaggacatagaataaatgcgatagcatcagatacgaaatcacaagaccttttgggttccagttgcagcagttctgcctcagtttcttcatgtataaaatgaggatgatacctgctctgcagggtcgctccgaagactaacataagatgatgagaaattataaagtactgtagaaatggttactactatgtcagtaagaaggaatattgtgtggctttgcttgttatctttatgaatggtaacatccagaacacaaatatggggaaggggctctgattaggacagcggcaaggcagaggaggacagagggctaagaccctggatgatgggaccctaaaggcagcacacagggcttgttggaagaccggctttgagggtcttcattgtattttggtgctgtgtttattgtcgtatgaacacttgggacaacttgaatgtgtgggaagtaataggaaatatgtataggctggccacccaacaatggggaccattgtgttagccctgtctggacatgaatctctgtgttgtcccagaccattaagcagggagtccaagctcactgggaggtcatgtccatgccatttagggagagaataaagacagggaacagttatgaggaaatgtcacaagcacagaagctcctaggaggttattagaacatgttcaaaggaggctgactaagaagccatggcatggcaggttcagtttggagaagagaaggactctggggtacatcatggatgccctcagctatctctcaggctattgtataaatggagacttggttcgttctgtagagcaaccagttatgtaggcaaaggctaaataacgagggaggagacggacctcccagctcagaatgaagaacttgcaattccgatggcttcaggagagagtgagatttgtgtccctaagggagatcaaagttatgttgagtaattacctggcctcgatcctagagggaacattcaatgctcagatgggaattgacttccgacgtgcctttctaacctgaaattctttgaaagtggagtcttccgttcagttccagccagagaattttacagaaggttgactgactcacaaggcaacccagaagatttgaagcaggaagaaataagaagtgagggttcccaattggcagaatttaaggagaacatgagttctccttaaattcttggtgcgaggaaaccagcagcgtctttggagctggggaaaggatgtggaaatgaggggggcctgggaacctcatagtactggacaaggtgtgcctgaggccagaggtcaggatatcagaggaggatttacgaacaagcaaacacacagcagggaaaggaataacaaatcactagcgaaagcctagggtggaagggagatactgaggcaaaacccaaaatgtatgggccagtgatgtcaactggggcaggctctgcaggtgatgctagcagcaaacaaagacttgaaactcatgacttcagaacgacaagggcttgcagtatgagctttcaaagagctggaaaggatccctaaggctccccaaatctttactattactttctgtgcagtgaacgctgatagtacttggagcttcatggtataagcattaaaagtatgtggtttgtattcaaagggtttacaatgtacagtgggaaacaagtaccatgtgaaaaagaacaattctttctatagatttcccccccaccctttactcattaccatattttgccatgttattctcatcattattgatgagaactattattagctgggctttcccacctcccagcgagggaggcagcatattaataacccccctgtcactgaggggcacccaaagcagaagtgtgactgactggctccaggctcatcctgtcaagaggcagaaccagggatgtacctgacagttaggtccccaaacgtccatgtgataagccaaaacctgcccagcttatgctgtcagacagtcaactgagttcaaagagccttttggttttagctgaagcaaagctgtgtaaggggatggtaatgacagcttttgataagtgtctgtcctcataggggtttggggcagagtcagctcctacacctccaatctgtgctcaccactttccactcttcctgcttgactgcaatggagagagagtcctctgagtctgcggggccctggaactctcctatagctccaagtcaagacacaggggtggcctgctttcaggaagctgtcctgggctgggcatggtggctcacgcctgtaatcccagtactttgggagaccaaggtgggtggatcactagagaccaggagttcaagaccagcctggccaacatggtgagaccccgtctctactaaaaatacaaaaattagctgggcatggtggtgcatgtctataatcccagctacttgggaggctaagacatgagaatcacttgaattaggaaggtggggtttcggtgagccgagatggcgccactgcactccagcctgggtgacagagttggactcagtctcaaaaaaaaaaaaaaaaaaggaaagaaagaaagaaagaagcaacagctatgctgggggccatttcgttttatatgggagggatggcatttgctaaatttgtggccaatgtggctgacgtatattgagcactgagtgggcatcactcactattaactacctcttcatatgcaaacccccttcatcttcacagtaaccctgtgaggcagagcctaccattttctctgttttatggataaagaagatggttccctgagttactgacccagagccacatagccgggagtggcggagtgggaaatccatcctcgtttcctctcacttgagaccccaggttcctattctctgtgctaaacagacacaggaagacactttattatagggttttttttttttcaccgtaatcatgaactgatgattgcttataaaacaggtgtgaaactactaggccctgtaatttgtttgagaaggtgagtagaatgacaataacaaaaacaacagaaaaacccccaatttgttgaagatttgaagcaggaagagataagaggtgacacatttgttgttgctcttgaggattcctacctttacacggtgttttcctgttgacgaaaaatatgtctatcctgggtctggaattttctggataaatgttggtgttcatctccatatagcgtcgctctcattcatgcagatgtccacttttctctgtgatattaacctttatttaaaatgtatttatttttattttaaaatcttttttttgagacagaatctcactctattacccaggctggagtgtagtgacgtaatcacagctcactgcagcctcagcctcccgggctcaagcgatcctcccacttcagcctcctgagtagctgggaccacaggaatgcaccactgtgcccagctaatttatttttattttttgaagagatgagtctccctatgtttgttgcgcacgctggtcttgaacacctaggctcaagcaatccttccaccttggcctcccatagtgctgggattatagtcatgagccactgcacctggcctaaaatttattcatttatttatttttgagatggagtcccactcactctgtttcccaggctggagtgcagtggcgcgatctccgctcgctgcaacctctgcctcccaggttcaagtgattctgcctcagcctcccgagtaagattacaggtgtgcaccaccacatcagctaatttttgtatttttagtagagatggggtttcatcatgttgcccaggctggtcttgaactcctgacctcaagtgatccacctgccttggccccccaaagtgctgagtattgttttgattgactaataaacattgtatatatttacggagtaaaatatgttttgaaatatgtacatattgtggaattagcctgtgtttttaaatgcttactttctagaactgtgggtggaggtctgggtgaaccttgttacatttcaaattcaatgcctataaaataagaatttcaattttgaataagcagtgtgtggtctgtgctggtccacacacggttactggtctgtgataagtatagaaatggagaggaagcgtttagaaacatctgctgatggaataattttctgtctgttgaatctaagaataaaaaatcggggcttgcattttgtgtataactagaagtaaaagaaaaattggtccttcacccggatagtttgagatgcactgctatagagaacgatggagcatgaagcacctgttctgtgcttttcttcctctcacgattgtctttaaatggtcagcatcttagtagctgtctttgcttcagaatttcagtaccttccctttttttttcgagaaaagacactgtttctggaaaaaatagtaacagtcacccagaaaagagatcgagacaactgatcgtcaagttggttaactattatgtgctggctttgaacatcaagaacatttcaaacgagggccttttttttttttttgcatgattttcacattaatagaaaatggtgaagtagggtatcattagattttcccatttgctgacagttcactttgaataaaggtggacttaatgatgtactttaccttataaagtatggagtacatgaaacccaataaaaactcttgggtgaaaccctagctttgtaggttgaggcagtggaaccttcatgtatatttgaagagcagttagtggattctggattatgcatagaattgaaccctgaaacagaaaatgaatcttttgggtgacctcatatctttgcattgattttctttcccaaataaccattaaaactcatgggttttgtttttgttttttttgagatggagtctcgctctgtcgcccaggctggagtgcagtggtgcaatctcggctcactgcaagctccacctcccaggttcaagcgattttcctggctcagcctcccgagtagctgggactacaggcgtccaacaccacacccggctaatttttgtatttttagtagagacggggtttcaccgtgttggccaagatggtctcgatctcctgacctcatgatcctcccgcctccgcctctcaaagtgctgggattacaggcgtgagccatggcgcccagctgtgtttttttattcatggagaaaattagcttctgtagaattttcatctacattcagagcaagagtttgaaaaatggtgaaaatggacaaagatcacatgagcacaaagacactgtcaagttttggcagagctggtatcgccagttccatggcgttggtgagcacagagacttccagttctgccctcagacatcacttctaaattgtcatatttttggtgttcagcttttatgtttagttgacagcctttctaccaaattctaatcagatttccaagtaaaattatattaagggcattttttattttccgtgattttatttaaattttcctgttttcttaatataaacaaatacctttccattctgttatctcaggttctgatgacttcagatcagaacttactatcttcaaatcctttattctgtttttttgctcattattgactctgttacattagttagagcttctttctctctctcccccttcctctctctccctccctcctccctcccttctttcctcccttcctgtttttccatctgctcttgaagattcctacctttacacagtgttttcctgttgacgaaaaatatgtctctcctgggtctggaattttctggataaatgttggtgttcatctccatacagcgtcactctcattcctttctctgggatccctgttgtctgctttctcttccacacttgccaagctgtccctcactttctcccactgactcctctaactccttgccgtcggcccaaacacattcctttctcaggacgtgattgtttttctgtccatctcaatctcttgtgtggtatcttccatcgttgtttttgaatggctccctgtgttacctgaacagcattcttcagtcctcttgagcatgtcactgactgttgtatgactgatttgaccagtatccccttgggtccagaggttgccgtagtgttaaaaccaagccccgctcaggccctggggtcagggctaggctgagcagagaggactgacctctggctcccaggccctgccttcaggaccacgtggcttctcttgttagttccctgtggggcctgctcttcgtgctgtgtatcctcatgtgaccatacggagagctgttactggtctgatgaccattattgccgcactctcgctgagaagcaactcagatagcgccttgctgtgatggtttcagcaaatgcttttcatatatgatcttgtatgatgaaggctttctttagtccctgggcccttaacagtggtacttggttatatgtttggagttgatgaagtcagagaaggatgggaaggagcgtggaactgttcctgcttcttttgttcttctgtcaggtacagttccctttagggatgctcccttcttccccttagaaatacatcaacaatattaccagagaaaaactaccctaaacataccacaattggtctcaggtgatctaggcggaggaaaaattgagctgggtgtctgagatccaactcctaggcgtcaattgactgtggagagacagggcacaagttctgcctccagtttcacaacttggaacagttaatgtccagcactgtttccattatgatagaatgatgcctttacaaaaacaaacaggccaggcgtggtggctcacacctgtaatcccagcacttcgggaggccgaggcaggcaggatcacctgaggtcgggagtttgcgaccagcttgaccaacatggagaaaccccgtctctactaaaaatacaaaattagccaggcatggtggtgcacgcctgtaatcccgtctacttgggaggctgaggcaggagaatcacttgaacccgggaggtggaggttgcggtgagccaagatcacgccattgcactccagcctggacagcaagggtgagactctgtctcaaaacaaacaaacaaacaaagaaaaagcccttttaggagctcatattgtagaacttcactgtattatttttttttcctgtttcttgttttgttttcactgaagcatattttgcttacccttagttccttgcacttgccagggtcccgttctgacttggtgtctgttcttttctccttgccccagtgtatcccctcgttctcacattccagatctcagtctgcctattccaggacttcccatggaagcagggctaccattgagcttcctgtgggacacttgtggtcggggccaacatgcataattgtgccatctattcacagaaccagggcgcccaattgtaggagtgagtggggcttaaatccagccaacactgtgccagcctggtggaaccacctcctctggggctctgtcaatcctccttggatgcaggtaatgtctgggctcatgttgtcctggccggccctgcctccttcactggtggccaagcagtgtcaggacatagatctttgaagggctgaactggaaggcaaacccctaccctctggtttcttatttatttatttattcctgacaggtcgtagctttactctgcttagaaaatactccgttgatttcttggaaaagaagggactctcactcatgtatattgatgaagtgaatttttaggaatcatagttctatgaatatggtctcactttaactcaccttatgaaaggaaaacattaagaagcaaccaagggtatatttagtgccatccgatttcaagggccctagaaaacagtctcaggcatttgctgtgtgaagctgaacctcctcagttgcttatgagacagcgaaagcacagaaggaaaagtggttgtaatttaacgtctacactgttttcccttctgctaaaaacatgcctaaaacacctcaaatagataaccctaacatccaatatgcaaccccagcaacccccaactgttctgttgttgggggtgcagtccgtaacagaagtggcattcatagcttggcacacaccactctgagatggtgagctacgctaaagaaaatgaccagcgtttgcggccccttcccatcttctgctgcagggaatgtggtcaggtggagcattttctgattaaacaagtcctttgtctgactggcggccggttggggtgttggcaattggctcccaacatctgggaatcatttccacggctttgcctaggttgaaaactcagttcatgtcttgatgtgaatgtctgaaggcaaagcaatttcaacaagcctcaagaatcccagggattcttgtaagatactctcagggttaaggattctagttcttattgcacattttgcattttttgttttaattgatgctgtggtgggggcgggggtggggggcagtggttaggagagaaggatattgaataagcaaacagaaagctggagaagcccaggcttgaattctcagccagacactgacattctgacttgaggcaagtaacttaaccttgctaagcttccgttgcttctgttcaatggagatcatcatatctgctttataggattatggagaggattaaatgaaaatgtgatagtccttggtaaacttcatccaaatcctacagataatgtgaagatggcacgtgctataaaaaggatggagttctgtcctcaatgaattctcaacgttcccttttgagtagatgacttttcgttgagacctttacaggctgtttaggtggccctttgttatctgtctaacgactgtccaggccttctgtggcaattataaagatctggtatcatgtctctgagaacaaaaaccacctacagaaggagctgaagagcaattcgcccttaaatctcacctgttacgaactagatgccattggtgatggaaaatatcagtgacccatacggagagagaaacctgccctcaagtagctgcattttagcagagctccaggtaggtcactgctcacctctaaatcttctgaagaggtttcatttttttgttggtttttgttttgttttgagttgcagtctcgctctgtctcccagcccagattgcagtggcacaatctcggctcactgcaatctccacctcctgggttcaagcaattcttccacctcagcctcccaagtagctgggattacaggcacctgccaccacacctggctaatttttgtattttttagtagagatggggttttgccatgttggccaggctggtcttggacacctgacctcaggtgatctgcccaccttggcctcccaaagtgctgggattacaagcatgagccactgcacccggccttgttgttgttttatagccctagaaaaactggtaccaaacaataaggaagagactgaagggaaaaaagaagatggggaggggctttaagaattctgttcccatagaactttgtgactcactgaaggccagcaagctggaattgtcgtgatactcacagtggacattaacgaaaacagtgaataaaagtaaaaggggaaatgttctttctttgtgaataccctcgtgatctgaactgggggctgaagagggaggatggggtgacatggagtagattcaggaaaagcagagtagaaacctgtgaactgaaggagaggaccaatggatgaggagaggatgcaattttatctagtatatgttgcgtaaatttgtttcctggtctacacttctaccaccaccctaatacagtaccgctataatatgtttccttccttcagcactgactcatttaaaaatcgtactggccagccaggtggtgccatggctcacaacttgtaatcccagtactttgagaggctgaggtgggaggacagcttgaggccaggagttcaagaccagcctgggcaacatagcaagaccctgtatctggagaaaaatttaaaaaagcaaccaagtgcagtggcacatacctgtaatcctagctacttgcggggctggggcaggaggatcgcttgagcccgggaggttgaggctgcagtgagctacgatctcaccagggcactccagcctaggcgacaagagtgagacccttctcttagaaaaaaaaataatcataatagcctacatttttgagggcttcttatatgccacacactattctgagttcttgacacacatttaatcttcagaagcccccatgagttggccgtgtttttatcccattgtttagacgtggaaactgaagcacagagggcagaagtaagttgaccaagtccacacaactagtaggcaacgcatagggatccgagccaggtgtctgattccagaggccacaagccagaatataagctccaaatataaggtggggacatttgtgtctttgttcttggctgaagctccagcacctaaaagaacactcaagaaatgtttgttgaataactcaatgatggtcttagccaccatgctctcctgcctccaaactcaagatgggttgcaatggacaggggtcattaactaagcagtctcaatgcaacgatctcaatgtgagaccaaagtagagaatgggtacaaagtgcaccacagaagctatagggggaagcttttggaacaactactcttttttttgagacagagtctcgctccgtcgcccaggctggagtgcagtggtgcgatcttggctcactgcaacctctgcttcctgggttcaagcaattctcctgcctcagcctcctgagtagctaggactgcaggcgcccgccaccatgcccagctaatttttttttttttttttgagacagagtcttgcattgtcgcccaggctagggtgcagtggtgcgatctcggctcactgcaacctctgcctcccggcttcaggcgattctcctgcctcagcctcccaagtagctgggattacaggcatccgccaccatgcccagctcattttttctatttttagtagagacagggtttcactatgttggccaggctggtctcaaactcctgaccttgtgatctacccacctcagcctcccaaagtgctgggattacaggcgtgaaccactgcgcccagccaatttttatatttttagtagaaacagggtttcaccatattggccaggctggtcttgaactcctgaccttgtgttccacccaccttggcctcccaaagtcctgggattacaggcgtgagccactgcgcctggcctgaccaactactgtttatgcttctaattttgttagttactaaaatatcgctttcagtctcatgcagtaaaagcaaaaggtttttcagtgacttacaaggctctgtgcacaccatctgtcccctgccctcttcctctgccatgttcccacttgcttactctgctctaggcatattgacctccttgcttttcctctaaaagtgccaaggccattccctccccctaggctttgttcttctgcttggcttaaccagaccttccttcagatctttgctcaaatgccacttccttggtaaagccctctgtgacctccctgtttaaaattacaataatcccacctgtgcacccctccctctcgcgtggtacctgctacattaggaatatttgctgaatgaatgaatctcagacaaatgggagatgggcggctaagtctccagattgtcctgcattgaagtgcttggagaagtttgcgaattttcccactcagttcaaaccacatgctcaggaattaaagtgttctttcagctttcagatgttttcgggggatagcattgtaacaaagcatgaaaaaaagcagtgttgggaaattgagattcttattacagtgggagtacctggttgtcatttcaagatgaggatttgttaagggatgggacaagggatgctgcctgggacaataaaccaaagaaagatttaaaacagagaaaagagttattagttacaggactagcacaaacaaagtagggctctccatctttttcctgtctcgctgaaaacccatcttttcttcccttgaataaacttctttgctttctgtccccctgctttgatttattattttaattctatagctgtcttcgtgaagtatgtaaagcatttgggggtaaaatcatgtggaagacattatagaaactaaagatgtgtgatattatgtggtgttgggtagaggctcagcgtgcttatgaatcacacggttgatgaaaacaccaatctgtccagggccattgtctatcagctgtataagaaattggctcattgttgagggtacaagaaggaggaatgtaagggggactgccggaataattcggttagaattcggtaaaaccggagcatggagaggtctggttgacatccctcctttttatactgagagatgtccctgaaggtgaggtttttattttcttgcctctaaaagggaaataatgaatgtttctatttcttctgtcctattactctgtgatgaatgcttcttttatttttatctgagtctaactccctccaccatacttagcatcatgcttgcatcatatccattaataaatggatgttgaaagaatgaatcaaccatgcttgaaaacttagatctctcttgcttttcaagagactcaaatatttaaaagcagctatggagccgtgtgcggcggctcccgcctgtaatcccagcactttgggaggccgaggcaggtggatcacaaggtcaggagttcaaaaccagcctggccaacatagtgaagccccatctctactaaaaaaaaaaaaaaaattaacagggcgtggtggtgggcacctgtagccccagctacttggaaggctgaggcaggagaatcgcttgaacctgggaggtggaggttgcagtgagccgagattgcgccactgccctccagcctgggtgacacagcaagactctgtctcaaaaaaaaaaaaagaagaagaagaagaagaagaagtaagaagttatgggattgtgcttgcaagcagcacagtttattgtgtagcatcagagttttcatcattccaagtattagtgataaaaataattctgaaggataaatggcatattttccattgttgatttcaacacagttagactcagcagtgcaccatttctgataatcatctatcattttactcagcatatgcaaaaaatgatcttagcatcacatggcaattagatgcttttttttctggcacctggtgtgcttgttcatgaagtgcactgagattccggaaatataatttcaaaagcctagaaataatggcccatgtcattttcttggcattcttcaaaaccaaagccttaagagtccatggtttgtccttttaaaccccagcaacggaaagaaagggccttggcagtgacaaagaaagagaaattctcttgggggtctgtagtgaaaagggatgtaatcagtaccaggcaagccactttgattttttttttaaaaaatgaacaaatataaaccattactcaaaatttctttccagtctttttggtgcttcagaatataaatgtggctcatttttctctaataagtttccatttattatcatagtcatctcttcagtgctcaatcaaagtggcaaggttgtatttgtggagaaaacagaatattttgtaacatggctatcctgaattttagaggcacttactagggatggaaaaactggtctgaagttcttaggcatactcttaccacctaaaagtgttcagcgataaaaataattgctttgtttttacctttgaggaactccaagtatcaggttaaaaattgagagaggtagtgaaagagagtcagtgattccagtgtttcagaaagtctgacctggccagggtccagctgggctgcaagaacctcctttctctccctgtctctgcagctccatcactcaccattctctccaagtcccttgggaatacatggggagaacctagtggccatagcagatactgctggtccccctcttcccccactccttgccacctcatcatttgcttgcacaaaaccttatggttctcaaggcccagcacctgtgactctgcccgagggtttcctctggctgtgggagccccctgcacccacacagggggcaggccacttgggagcaggcccaggtaagactggcaggagttggtggataaacaccccagctctcttgtctctaggtggggataattctgaggcatggtctactctgtctcccatatttccctggcaggattgagccccagttgtctgtgtccataacctgcttgagaacacagactctggtatcttccttccttcccttctcccttcctcactgtcttatggctgttacctagagtcacctcccagttaacctaccagcaccctcatccttgtacaaggatatgtctgagggaacttggtataagatattggaagtatatgctcttttgtccatccatccatccatccatccatccatccatccatccatccatctctccatccacccattcatccatccatccatctctccatccatccatccatccatccatccatccatccatccatctctccatccatccatccatccatctctccatctacccatccatccatccatccatccatccatccatccatccatccacccacccaaccatccaacaagcatttggtaagctcatgctgtatgccaggtattgtgttaggcaccgaggagagcaagaggacagccaccgccctcagggagctctcagtccagcagggcagccagtcccaggataggacagtgagaaaggacatggaggttcaagacagaaaaattcataaagccatccagtatggcttttgctctcccggtgtcttcaggttgtttaaaaattaaaggtggctttccagcacctattattatcagaaatggtcttattggttcacttgcttactagtccattgcctgtctcccttcctagaatgtaagatccatggaaagaggtacttgtctagcttattccatcattgcttcctcaactcttagaacaggggccaggctggcgcatgataaacatttggtaagtgcatctcatagtcattaaggcgtctgctgtggaaagtttgtcagtttcctcctgttcctcccggagtaagctcatccatgttgaaatatacccaagctccactctggatgcagtgttccagtgcactgtggaagtctctgctcaggacaggagggatagcaagtgtgctgcccaccctaggtccgaggtggccacttcctgctagccactgctccttgggaacaaaggacacttgcccaagtgtgtccctaaggtgagcgctttagcatcaagaattattcaactgaaaggagttggccggacccagtggctcacgcctgtaaatctcagcactttgggaggccaaggtgggtggatcacgaggtcaggagttcgagaccagcctggccaacatgacaaaaccccgtccctactaaaaatacaaaaattagccaggcgtggtggtgcgcacctggaatccgagcgacttgggaggctgagacaggagaatcacttgaacctgggaggtggaggttgcagtgagctgagattgcgtcactgcactccagcctgggcgacagagtgagactctgtctcaaaaaaaaaaaaaaagagttttcttctaaatagcttgctgagtttctctattttctttgtacactgaattctaaactctcagttgggagattctgccaatgaaacactctttgcagtctcctacctctgctacctgggcttgcttgatgctgggtgatgaaccacccaggtacctacacaacaccctggttgtcagcagtggcagtggaaaggagagtttgaatttggaatgtagacattttgtaaacaggttcagagaagtaactgcccaccgtcctccccactgtggtgtgcaaagctaaagagctgactcatgtgatcgtgggggttggcaagtccaaaatcggcatggctggagattccagcaggagttgatgttgcagcctggagtccagaggcagtcttaaggccttcaactgattggatgaggcccacccacatgaatggagggtaatctgcttttctcagagtctactgactttaagtgttaatatcatctagtaaataccttcacaacaacatctagactagtatttgacaaaacaactggacaccgtagcctagccaagttgacacataaaattcatcacctcaagaatcagcactaggtttaacatgaaaacaacttgtatttagtgcaatttatcaagtgcatattgagactggctgaggttcttcctggaacttacttctctctctcactttctccctctcttttttttttttttttttgtgagtcttgctctgttgtccaggttggagtgcagtggcatgacctcagctcactgcaacctccacctcctgggttcaagtgattctcctgcctcaacctcccaagtagctgggattacaggcacgtgccaccatgcctggctaatttttgtaattttagtagagatgggattccgccatgttgcccaggctggtctcaaactgatggcctcaagtgatctgccagccttggcctcccaaagtgctgggattacaggcatgagccaccgcacctggcccctggaacttatttgttagtattcaggctactgaggtgttgcacctgcagactctcaggtggcactcacccattctctctctctgccgagctcccgtgttccatcctttgttcctcagtgtccccacctgttaacgtgttgaatgtaatccccgtgtcttttggataaatcagagaatcccatatcatttgttacttaggatcctgagcattcagttttagctttcacactaaagatagagaaaataaaaatagataccattaatctttacacttctcctgtggtcctgattgccaaccatagtctgaaagatctgcagtggatttattactttgcatgttctttatttcctttaaacccgggcgtgtgaggaacgttgatttatggagcctagatcatgcttggctggggaatgggaggagggaagcaaagtgttgttcaagctgcagtaaatttaaacatcactagtatttctttacacatgcaagggggaaaagtcctaacttaagtccattgctacaggagctcataaattaaaaataacaagactatttcctatacacctggagcttcaaaattacatgccgttaattctttgattgcccccttcacaaaagagccattgagggtgacaactcaaacaagatctccaccacagccgtgaaatccaatcagtgattcaccttgtgtctttgaccttgttcaagataaggaagtgacttgtctgaaacatagactctaagaatttagtcccattatttttttcctcaaacttttccctctcattactctcttctctctctctcctctctcgttttattttttctaattttacataaattttaaaacaaatctaacagcatcagaagaccaaaacacaggaaagtcttcttgactttccactatgttctgagccataaatcctttcgtgtgctcaaataatacaccccagctggtctgttggatgaatttggttagcctcttaaatgttttagcacctgtacaccacagagctcccaaaagcgaggaaattatgtttcctcctgtccccaacggattgcttttcacctgggccatatagctgctgtgtgccactttacagaggttaagactgagcagtcctggaggacacagaaagctctaaagaagtacagacacaacttcaagtcctcatatattttacttcttcatcttgttctttgagaactacgtttactttctttgagaaaatgcataaaggagaaagagaggatatactttattttgatttttagagaaccttgaaagtgtcatgccagaagcggtggaattgagttttcactcttataccacccagacctttcactctaggtatataccaaagaaaaatgaaacgaaggcgtttgttcacgtcgagacttgcccgtgaatgttcatggcagtgttattcatcaaagcccccaaaatgtaaactacccaaatatccaccaactgataaatgaatagacaaaaaaaacatggatgtccattcagtgagatactcttcagaatcctcaaacgattgctacacgcaacatgactgaatctcaaataatgatggtaagcgacggaaaccagatcccacctctacagatggaaggctacatatgctgtgatttccttcagtgcaggatagacaatagaaactaatagagtgacaggaagcatatcagtggttgatgggaagtgagggtgggagggaggaaccgattacaaagggctgtgaggaaatgtttgggggtaatggatttgcttatgatcttgactgtgatgatttcacaggtggatacatatgacaaaactcatcaaagtgtgcagtttattatatatcagttacatttcactaaagccaataaatgatggccaggcatggtggctcacacctgtaatcccagaactttggcaggccgaggtgggaggatcacttgggtccaggagtttgagaccagcctgggtgacatggcaagaccctgtctctacaaaaaataaaaaattagccagacttagtggcatgtgcctgtagtcctagctgctctggaggctgaggtgggaggattgattgagcccaggaggttaaggctacagtgagccatgattgtaccactgtactcgagcctgggcaaaggaacaagaccctgtctcaaaaaaaaaaaaaaaaagaaaaaagaaaggtaataaatgaattttgttgggattagagaaaatgttttgagatggggcgagaattgtcttaaaaagtaaatagagttgcaataagtggtcgttttcctctggaaggaaaagtgttaataataggaacccctatgaaatgtattggattggcctcattaactattttttcccccaagggctcaagataagaaagtaccacgggaaatctccaaattggtacacaaatctaaattattttaggtaataaaaaatcatcaaagtagaataaacgggaagaaatgagcagaggagctttaatgagagcaaggagaaacattttgggtaaaataattcaaattattcttatgagatgatagacttggagaaactgtttataattgaggaaggggatgtaaggactttgttgccagaagattcagcctaagatcaccaggagtaactaaatgtgttggacatcatcggaaagaatattgaaaatattgaaacaaagtgaaaggtaccaccttacccttgggcaaagtgaacacttctttcaacctagaagttcctataaagttctgacaggccaggtgcggtggctcacgcctgtaatcccagcacttggggaggccgaggcgggcagatcacgaggtgaggagatcgagaccatcctggctaacacggtgaaaccccgtctctactaaaaatacaaaaaattagccgggcgtggtggcgggagcctgtagtcccagctactcgggaggctgaggcaggagaatggcgtgaacctgggaggcggagctcgcagtgagccgagatcgtgccactgcacaccagcctgggcgacagagccagactctgcctaaaaaaaaaaaaaaactaaaaggttctcacaagttcaacttataaaagggaagcaaagcctggtgagcgggtagagactcccatttgagaacgggcatttggaagaactccctagtccggatgacaagagctagggtgcaatctgagtagctcatttggcacgtggatagattattcattaagttttggaactatctcttaagacggggaagaagcagccttagggaacaacaaaacaagctgtattccacatcctaagacacagtaccgactgagaatataaatctgcaggtccagattaatccacagatggcaggctgcttgcaagctattagacaaagccaggggtgttcgggagcagatccccaacttctgactccatagagggtcacagcctgcctctcttgcacagaaagagatggaattctcagctaagtgccacaggacttctgtccaatacactagcccttctagtctgtttctgaaatagtcttttctacatcattttttaaagcggtccgttattccgagcacttttatcatgtaacacatcagctgccataaaagcttgaaggtggctgaaagtgggcgaggatctagaagccccttgggcaagtccagattggaaacacgtcatgggacctccttttagggacagtctcacaggcaggctgccgtaggatgacctcaggtgtcccatgttttgggtgggaatgtcaacagagcagatgcgagaggcatttcacccaagcacctggattgtttcatgcctgaaaggaggcaagacaggaaggtataaaatccagatcggtgcagttgctcagaaaagggacaggtgacggcctggcgttctctccttggcttcctgtggaatttcaaagttactgctttgggattgtgaactccagccatctgcgtgcttggaacctggagagcaatccagctggtgtctaccaccgtaattaagaggggtgtggagcatgtaggtgttatacacccctgccaatcaccaggaaggagctgagtgtggaattcacatttgaaagtgaagatgcaggaagcctgatagctcccaaaagaaacggccaccagattttgtttaaaacaaacaaacaacaacaacaaaacacacaaaaacaacggaagggtacactttagaaaaactattgactttttcccaagatatctgtacctcagccacaactacaaaaaagagtctcttcctctgttgctggcatctagtctgctgtaattgtagaattttctgatgctccatggccatcgttgcttctttgtcctccccactatttcatccgccggctcctgggaggggagggttccagttcactcggctaacgtgtgtgagtccgacagtaacgagcaacgcagaccccgggaagaggaacaagaataggacattcctatatttttatgtggagattgataatcaaggctaacaatcctggcagaaggtgaacaacacattaaacagaggggaaaagataataaaatatctcctgatgcttaacaatcgttgggtggaaacattccctggaattatacagctgttgcatttgatggctcataaagcctcagtaaagtccgtcaagggccttttttcttggcgagggaccattcttctcatgcggttatgatagcatctgcttcctgtccctggaagtgcacagaatccacagacactggcagacggaagcaggggaggagccctactgcagaggcatctggccctttgatggcttttgggtaacttctgatctacagggcatcgtatcaaaatgcagactgagatttagtgggtagccagtgagcacttgctaggtgccaggcactggcttagggtatttcattaatcctgacaactatgaggtcagtattaccatttttaaaacaatactatggaaaacagagccctagactccttaagaaacatacccagggcatgcggctgacaagtggcaggctgaagtccccacgcctggtagccttttttctgttactgcaaagatggaggaagaggcgagagttgcttcctgtccgtgctctgggtacgtgtgaaatcttgtgcatcttcttataccgggtgttcaggcacatgtgtgttgagaagggatgctgttttccagaagactcaaaaacaatgatgggggtcctaggtgacttactgttttaggtcggggtccccagaagcagatcttgatgaagtgaggatttctctgcaagtgatttattaagaatgtggtcctcagggaaactgggaagggagtaaaggaggcaggaaagggaaagagacaagccaaagatgagtcctttctcaggcaaaatccggtggacagcggcttttagcttcagcctgaccatactggggaactctgggggtttgtcctgatgggaagcagcagaggtgagcggtcatctccctcactgttcaccctgcagtcatctccctcactgttcacctagagctgtcatctccctcactgttcacctagagctgtcatctccctcactgttcacctacagcggtcatctccctcactgttcacctacagcggtcatctccctcactgttcacctacagcggtcatctccctcactgttcacctacagcggtcatctccctcactgttcacctacagcggtcatctccctcactgttcacctagagcggtcatctccctcactgttcacctagagcggtcatctccctcactgttcacctagagcggtcatctccctcactgttcacctagagcggtcatctccctcactgttcacctagagcggtcatctccctcactgttcacctagagtggtcatctccctcactgttcacctagagcggtcatctccctcactgttcacttagaggagaggtcatctccctcactgttcacctagagctgtcatctccctcactgttcacttagaggagaggtcatctccctcactgttcacctagagctgtcatctccctcactgttcacctacagcggtcatctccctcactgttcacttagaggagaggtcatctccctcactgttcaccctgcggtcatctccctcactgttcacctaaagcggtcatctccctcactgttcacctagagctgtcatctccctcactgttcaccctgcggtcatctctctcactgttcacctagaggagaggtcatctccctcactgttcaccctgcggtcatctccctcactgttcacctagagcggtcatctccctcactgttcatctagaggagaggtcatctccctcactgttcatcctgcggtcatctccctcactgttcacctagagtggtcatctccctcactgttcaccctgcggtcatctccctcaccgttcacctagagcggtcatctccctcactgttcacctagagcggtcatctctctcactgttcacctagaggagaggtcatctccctcactgttcaccctgcggtcatctccctcactgttcacctagagcggtcatctccctcactgttcatctagaggagaggtcatctccctcactgttcaccctgcggtcatctccctcactgttcaccctgcggtcatctccctcactgttcaccctgcggtcatctccctcactgttcaccctgcggtcatctccctcactgttcaccctgcggtcatctccctcactgttcaccctgcggtcatctccctcactgttcacctagagcggtcatctccctcactgttcacctagagcggtcatctccctcactgttcacctagagcggtcatctccctcactgttcatctagaggagaggtcatctccctcactgttcaccctgcggtcatctccctcactgttcaccctgcggtcatctccctcactgttcacctagagcggtcatctcccttactgttcacctagagcggtcatctccctcactgttcacctagagtggtcatctccctcactgttcacctagaggagaggtcatctccctcactgttcacctaggatggttgccgtggggaggaggcgggtggtgaatcccaggccttttcagcggccctccaggcctgcaggttcaagcaggctccagtggcctgagggcaggcctttgagaaagaggctgactgttagaagcagaagcccttgaaggagcacacagaaggggtctgggctaagcagcagcgtggcgacctacacccgcccctcctccgtaccttgcaggaggcagcgggtgctgaggaaatgggaaaagagccgcaagattaaccagatacccgtggtattttcaagcaacaccatctgctgtatttccacagaaagggtgttgattttcctgaattctagaggtggtgttttcatcactgagttcagatgcctttgattgatgagccaccttcaaaccaagtcagcatgaaacagaagcttgggttagttcacgttgtttgatataataggacaaggcagactaacgtctcttgagaatgaagggaagtttttcctacataaacttccacattctctcacaaggtgggaaaataaaaagggaaaatgacgtgaggggttgcccaagacagggatccttcccatctgaaaccatgctgtgacatgaagtgccacagattccaaaatccacgtgtgtctttcttcgaaaccaatagccacgtgtaaaaaaaattatatagcgtataaacccatagcagcaacattttaagtggaaacagatttcttccattttaaagaaatgtcaactgtgttagggagtctggggatccctcgcatacatcccagctgaacatgaaccccaaattcctgtgtaatgtatcgcagaatctgtcctttgctcacttcgtatctgtcatcaatcaacactgcagactctggaagcaagcatgttatggttttactcttgtgactaagcggagacaagaaggcatttttctcctccttgggctgtttggaaagcatagaatgaaatccagggcatggtcatcatgaattatagcgcagccaggctggtctagaatctctcatcttccaggcaaccccagccttggcagcaccatcaaagggtcatggataacaattttaaaatgcagtgaatgaaagtgttcatatgatgctaatggaatcataatttttaaagtgtcctcatcctttagagatatagactaaaatactggcagatgaaatgctatgattatgggacttttgtcacagtaatactacagagagaagtgcgtgcgtgcgcgtgtgtatgtgtgtgtatgcatgcatgtgcgcacgtgggggggatacacatggaataagattggttatggattggcaattgttgaagctgagtgacagacacataggctattctatttttgtatatgtttaaatttttccataataataggtcaaatagatcataagcatagtgtatactcacagatccctccagaagaatctaaatgcccagctacgctggtcaccgagtatccgccttgctctcccaggtgtccataagcccctgccacagggctggtgaggaagcctggctcccagcttgtggctacctttacacccatcactctgctctcctcccagaactccattcctccagtcacagggcccccagcataacaattccattagcatccttccctcccttatttcttgcaaaattactcttatcatgaattccagggactgtgttcatttgagtggcatcatctattactatttcatttaccccatcacatttctttttctcacataaagatacagtcatttgtcacttaataacatacacgttctgagagaggcattgttaggtgattctgtcattgtgcgaacatcatagagtgcacttaacataagcctaaatggtgtagcctactgcacacctcagctatatgatgtagcgtattcattctaggctataaacagtatagcatgttactgtactgagcgctttaggcagttgtaagacagtgctaagtatttgcatatctgaacatatatgaacataaagaaggtatagcaaagatacagtgttatcatcttggggactacagttgtgcatgtggtctgtcattgaccaaaacgttgttctgtgacgcatggccatattaaggtatacactgggtttggctgcttctatacaaggagtttggataaatttcatatagtgtcagtcaaaaaagtataagaaaattaagccaagtataagaagctgtgatttgtcccagacatcatgacctcagaaacagagtgtctgtgtaggtgactgctctacaataggctcaggaaggcatcgtgtctgagggcccaggctacagactcctaagtgtgtttttagcccccaaggccatctccttttggtcattatggaaattctggagcttaattaaaaggaacctagagtgcaacctttagatttaagagtaatagaaagaataactccaaaacctgtttattgtagggcagttaactcttatgtgagctcttcatctcatgatagaaaagggtccctggtggaggggtctgatacaattataattctgctctcccccaatccccaaagcatcaaaatagaactctggcccctctcattatatagagaagcaaatcgttactgtgatcactagggagttcccaccagcattgctgtgggtcctgaaagagaaaaggaggttccatgatttgggaagtaagtttcattttctttcatatttggagagatagtttctgattacagccagtggtctcttctgtaaatataggtgggccatggactctagagactctcaggatataatctgaaggattgattgcatatgaacctgcctacagatgcagctcttggttctgttttggctttgcctcctcccctcactgtgtggtgggtggagctggctcctctcaagctggtgccttcctggtgtgcttgctgctgctgtggtgcccgtggcccatctgaattaacatcttctgcggtgctttagggtgctttgcacaaagtcacttgagactgatggtgctaaggactcatgggtaatggtctagtcttaatgttctaattcaatccaatccaacttttttgttttgcatatctacaaagtgcataggaatatgcttcgtactgggaggagaactcatagtgcttaataaggactgctatggtctgaatgttggtgtgcccctacaattcccatatgggaaacttgatcttcaatgctatagtattaaaagatggagcctttaggaggggatcaggtctcgagggctccatcctcatgaataggattagtgcccttatcaaagaggccagcaggaacttgtccctcccttcgaggtgggaggcggggctggactctggagctgggctcagacaccagaccaaaatgaggactagataaaacagggaaggggcaaaagcagcttttcataagacatgcccaccagtgtgccatgtccgtttactattgtcccaacaacactcaggagttaccgcccctttccgtggcagtgaccccacgacccagaagttcctacccttgtcctagaaatttctgcataaactaccccttaatctacatgtaattaaaagtaaatataaatatgactgcaaaactgccttgagctgccactctcagcacactgcctatggggtagccctgctctgcaggaccagttatggacctgtaacactactggagctgtgacaccgcctctttaataaagctgttttctgctaccctaccaccagctcgcccttgaagttttactgggtgaagccaagaactcttgtgggctacgccccactttggggctcacatgccctgcatcaccttttgccataggaagacacgttgaaagcactatccattagtaatggcccttgccagacaccaaatctgctggcactttgatcttagacttcccagcctccagctgtgaccaataaattccattttatttgtatgttttttttgttgttgttttttcttgagacagggtctcactctgttgcccaggctggagtgcagtggcatgatcttggctcactgcaacctccgccactcaggtgcaagcgattctcctgcctcagcctcccaagtagctgggactacaggtgcacaccaccacacctggctgatttttttatttttttggtagagatggggtttcatcatgttggccaggctggtctcaaactcctgacctcaggtgatctgcccacctgggcctcccaaagtgctgggattacaggcatgagcgaccatgcccggcttgaattctgttgtttttaacttacccagtccaaggtattttgttatagcagcaggactggactaagataaggactaatcttagtaggaaggaattaacatggaccttgtgagttatggctgatgctcaaaagcctggaggacgccttgcagctctttccacatggtgtgttctggaaacactgtcttaactcctctcagtttggtctggagtttgatagtcatgtagatttgggattggcatcacaacctatagtcaaagtgatgaatcctcttgcataacacaactactttgcattttaataattttaataactttgataactaaacatttactcaaaaatgtatttcttgaacatctatggagtccagatattggggtctactaggctttggctgtccttgtgatttttaaaaccagaagcacccagaaactattaaatccttaaagcaatacaaaatattcacagccatagcatgctcagtagagaacctctaatgcctgaaacaaggagactgtttactttagcacgtcagtacttgaggatttattctgtgttgcggcttctggcctgcgagttcagaataacatgatgtggatttggaaccaaaatgaacacagcaacagacagtctatcacgataatgggaaggagctggagtctgcagctgccatcggcatcaaagatctagcttttattgagctctctatatcccgacagatccttgtcgtatggaagtgatttgcgtaggctgagaacagtggggtgaaaagaaccagggcatttctaaaaaccagtgagagcaatttacaagcctgagccaagaaacaagctggacacaccacaaaggaaatgcattttcccagtaactttttttttttggaggaggctttagagggctggcctgtgaattgcatttgtttatgaattgtctagtaatcacttgcattgtcgctggatcaggaggggctgtattttcttcccacacctgatttccatgattcagtgcacctcaagagctccatttgtgtcaccttctctgtggctgacgtgtgcgtttccactttgtactgttaatcagttaagtgaatatgagctgggaagtgtgttcaccaaacacctggctagcccgaagctctttacatttgacaaaacgggagacagaaattagaatggcttttctattttagtctagattatggaattctgtaatcaagattactttaaaaccatcatttgaatgaggaggtaaaatagccttgatacttcactgctggagaggaacaatagacaaactcaaaagacaaaaacatgaattttaaatgacagtttgtcccaaggacatcgtcatactgtgtgctttttacagtctgcttgttatcttatgcaattattgccaatgtgttttgctaatggattcattgcaagtggacttaccctacgtggaatgaggaatgtccatatgtggtagatgtgttatttattgatgaggagaggaaagtggatcaatgtggtctttagatgtgcgtgctttgccttgggaagcaccagcattgtcgtctgaactacaattggtgtgtatctgggtggaatgtggtacccgtggtgagtttgcttgttctctttccgttggcccacttgcagcaaccaactgttgcctggactcggtattttgggggccattttctcttacttttatctgttggccttgtggttccatctgtaggttgctctctccgtctagcttggaaacaacataatgattccttccgaatcactggattcacagggttgagggacttgcctgccactgacattcgttgactgggattagaatttgaaaagattttcgctgttgcctcaggtgttctgaaaggtggaatgaatcatttccactcagttttaatgctagagggagaaaggagtcatgttaattagatgggaaagatgatctaatcctttctcaaagagcctttctataaggtttagggtactgtccagccagcctgcggctgcgtgagactaatgatgggtactgggctgttgttccatttctgctaccattcattgttggtgcctttggtaaataattccatttcattgtgacttcatcttctcattgggaaaatgagactggtgatgttgcgcctcttgggttaggcgtattctgtggtaggatttagagtcaaaagtgttttttatactaaaagacactatggcacatcttcgtaggacattagcttttctttgaagatctggtggtggggggaaggggaaccattttttgaacagtaaaaaataaagagatatagtatggaaaacaatgtgaaatgtgaatgaatttttaagatagatattttaagatgaatttttaagatattttaagatgaattttaagatgaatttttaagatagatatgctgctaagtaatttcttgctagatttcaactgctttggggtgtgtcttcctatggaaatgaattcctcgtgcccacggccattacatttcctacaacggaaactttgacttttgtttttttttgaagagacattttgacttattttttattctaccgtttttctatttgctacctcatttatttctacttctagtttgttattttcttccttctgctttatgttattcttttttgtaacttttagaatttggaatttaatgctttttaaaatttttatcaatataagtatttaggccataaatgtcccactgttcagtactttaattgtattttatgtattcagatagatagtgtttttattaacatttcgttttagaaattctgcaatttgggtttgtagttctccctttacccaataattacttaatatcaaatttttaaatttctgagggtaacagcctctttgttttattacatttatttatttctggttgtcttctattatgatcagataatattgtttttattttttaatttatgaatttattgagatttgctctgagttagttaatgtatagccaatttttatgaatttcacttgagaaggtgtattctcctttgggtacaaagtataatatgtatccagaagatctatcttttttttttttttttttttttttttttggtttttgagatggagtcttgctctctcacccaggcaagtgcagtggcacaatctcagcttactgcaacctctgcctcctgggttcaaaaattctcctgcctcagcctcccgagtagctgggattacaggcacccgccatcatgaccagctaatttttgtattttttgtagagatggggtttcaccatgttggccagcctggtcttgaactcctgacctcaggtgatccacccacctcggcctcccaaagtgctgggattacaggtatgagccaccatgcctggctaagatctatctttttaaaaaaattatttactgtggcaaaatacatttaacctaagatatgcgattctaagcatttttagttgtacaattcagtggcattaattacattcacattgttgtagaactatcaccattacctgttttcaaaactttttcatccctccaaacaatctctgtaaccattaagtaataactccccactctcctcccctcaacccctggtggcctccaatccactttttgtttctgtggatttgcctactcataaaagtggaatcatacaatatttaaccttttgtgtctgatttatttcacttagcataatattttcaaggtttatccatgttgtagtgtgcatcggaattttattcctttgtatggctgaataacagcatatcattgtatgtattatatataccatacttttttatttatttatctgttcatagacacttggactgtttccatctttggctattatgtaagtaatgctgctatgaacgatggtgttcaaatatctctttgagtctctgtgttcagttcttttgggtttataactatgagtggaattgccgagtcatacaacacttgtatgtttagctttttgaggaaccgtccaactgttttccacagcggctgcccattttacccatcagcaatataccagggttccagtttcttcacattctcgacagtatttattttccttttttttaaaaaaagaaaaagttatggccattctattagatatgaggtggtatgtcatgattttgatttgcatttccctagtgactaagagatgatgttgatcatctcttcatgtgtttactggtcatttgaatatcttctttggaaaaaaaagtctattcaaatccttcgtccattatctttatattgttgagttttaggagttctttatatattctggatacaaacatttatcatatatatgatttgtaaatattttcttccattctatagtttgtctttacacttttttgataatgtcctttggtgcacaaaagcttttaattttagtgaagtccagtttatcttttcttctgttgcttgtgcttttagtgtcatatttaataatctgttgtcaaatcctaagttgcaaagatttacctgtatgttttctcctaagggttttatagttatagctctcatatttgggttctttacctattttgagttaattttttgtgtatggtgtgaggtaggggcccaacttcattcctttgcatgtagaaatctggttgtcccagaacactagatctgttttattgatcatgttatttagatcttctatagctttatttttttaaaaaatctccctgaattaccttggactaagagtggcaatttcaagcagcattattaagagccatacagaagcctgaggcaaaaggaaaaatcagtaatactgcatcctgtctttatataaaatataaaattttcacattttattcatcacaattttttgcatttatttttattttttaaagtattgcattaaaagattattgattttggttcctgagtttttgccatcaccttgaattatgtgaccaagaagagtgccttttcaccttactatagtcccagccctggggtaaaggctcctaatttgagtgtgtttctgtctatgtcttcttgcagctcatgtggttttgcatttttgaaagcggttgccatgtatctggtataaaaatattcacaagtgttttacttctgctgtaaattgtgactttttctattacagtgttatttgtcgtaatactttttggcatggattctgccttgtctgttatcaggattacaaacgataggggaaaagataagacactaacaagtcttcagtttaccaatgatgaaatcagggcccaaggactctggcaacagttgaaagaattatgatcattaagttaaaaatgtttattacttctaaatcctgatattaaagtaacagcccagcgtacttccatgtagaaatgatgtcattctgaaatggtataaataaaaattatagtcaatattctcatcatgttcaagcagggcatgggccacaaacccacctaaggacctgggaagggcgggtttcaataaccttcaggctgaatgccactcatacaaataagaagcgtggaagctgagggaaggccaatcagttgaagtagggtgattcagcccactcaatatttgaaatattggttttaatgagatcctagggctccattttagagctactagaagttttatgagtgaagaagggagctgttttactgcactatacagagtctccttatctttcccttttgtcattcttgccataaccttatagcctctaacttaatcagcctggcttccttcacgtaatacagcagcacttaacattgccttcttacttttcttctaagtagttctagtttctatgtctgagcatccagggaggtaaatgcaaagaaggatggaaataaaatatggctcagctgtggcctgagcagccccttccaaatgcactcacggcttctctgcacatcttgatatgtgaatgggaaagaaaaaaaagcacattttggtccagcaggttttcttccctttgtctccctctgaggtgctcagaggcatcagtaacagagcaggaaggccctggccaacaaaccttagccttttcctttgataccttccattgggagccttcatacaatgcatttgaaagcactttgtcagcagactcctgcttcaggcaaacattgagaaaactattgaggaggcctcaatggaaaggatctgatctgccccagaaactgccctagttctctggcaggagagccaccagcaggagaagagaagtcctctctcctaccccattttttttctttctcctttttcctctcctttctattgtaagaattgtgggaactctctttaaatgaaaataactctcaggctgagctttgtctcccaatgtggataaatgcccagatatctcatatcccctctgtaaagctggagtctcagttttggatgatcacaaactatttgggacaaatgtttgagctcaaggagaaacacatggtaggtggtgtgtgcatagctttttctaaagcacctaaaaattgaatacttgttcatcagcctactgcttgcaagccctttgctaccacttgctggtctgttgtttgcgcctctgcaggctggctctgtgtcatgtttgcattggtatccgatctctccctgcaccaccccttgctcgattttaattgaatttaatgatttctgaacccctaagcgtctatcactttttaaaatccatactacaggccgggcatggtggctcacgcccgtaatccgagcactttgggaggctgaggcgggcagatcacgaggtcaagagatcgagaccatcctggccaacatggtgaaaccccatctctactaaaaatacaaaaattagctggggatggttacacgtgcctatagtcccagctactcgggaggctgaggcaggagagtcgcttgaacccgggaggcggaggttgcagtgagtcgagatcacaccactgctctccagcctggtgacagagtgagatctgtctgaaaaaaacaaaacaaacaaacaaaaaacaacacacaaaaaaacatactgcattagtttctacctacagtttcagtataagcaaatgcttaaggtgacgatgccaagagaaataaaagctctctttagctgccttcttctcccgtcattgagaagagccttattagatacagatggatgaatattcaagaagccagagagtgtgaagaagtgagagaggctgacccttgccctgagcaatgctagactcttggttgggaagttctgttctgccagcacccctgaggccagagaggccttgctggtcttctctgcgtctccctcaggacatggctgcccagtggaggacattcagccactcagcactgggtatgatcttcccttaacctattcccgtctatcaaaatgaagagccacttctagatctaaatttctgtaattatctgataatttatgttttattctaattacaaatctggcccattaaaaaaaattgagactgtatcagggtataaagaaaaaagacacccatgattccaggagtcagggataaccattagtggctttttagtgtgttaccttctcatcttttttcatacatctgtagttattttgcagaattagattcctgtgtgtatgcaacattttcttcactaaccttatctcttgaacatttacctgtgtcatttagtataaactgaaaaataaatatccgtgaagactctagatcattacattatgtggattatattttatttaatgaataccttatcgttgtatatttaagtgttttgctgtgataaatgatgctgccatgaatatgtttgcacacaaatctttgtacacatctgcgtttatttccttagtatataattctagcagtcaaggtgttttgatatttttaaggcacttaatacacaatgccaaattctacaccagcactatatgaatgcccagtttctggaacccactccaatactgaatgcgatctttgcgtatttgatagtttaaaattatacctcactttaaaagttgtttccttttcttgctcatttggttgaatgttttcatgtgtctatcagccatttaaattatcctgctaaatttttttctgtggcttttagtcttccttccattaggatatttgggtttttcttagtgatttttaagaactctaggattctattattttaaaatataaattgagttaccaaaatagtttaaattttaacaaaactgctgtagctggcctccttttataaggtaaccttgttattgtttgccagctgttgtgcctggcacagagctatgcatacccaaggggctacataaatgctttttcattttttatttttatttttatttatttgtttacttatttattgagacagaatctccctctgttgcccagtctggagtgcagtggcatgatcttggctcactgcaacctttgtctcctgggttcaagcgattctcctgcctcagcctcctgtgtagctgggaccacagctgcatgctaccatgcccagctaatttttgtatttttagtagagatggggtttcaccacgttggccaggctgggctcgaactcctgacgtcaggtgatctgcccgcctcggcctcccaaagtgctgggattacaggcatgagccactgcacccagcccataaatgcttttttaatgagagaatgacctattatctaaacataattgatgtacagtgttggttagcagagctagtaggagaatttttagtccattaggagttataagaaaagcttttagaatgaattgtcccagaaaggagagctggaagaaaaaaacccaaaacaatattccacatccacatatatgacctaatgttagcggaacatcacagaggacaaatatcgcaaatcagaacaaaaggacagctcagaggtatttttcaaattgaacaaaattgtatgcatgcaaaatataaatagaatgatattagaaagattttatcaaatcttaatgtttcggcacttttttcctgctgtttttaaagaaataaaacatgacagaacagttgacacctctgcatttctccttttatctcatccccctttcatctataacacaggtggctttgattttgaatatggtgcttatcatctgagtgtgtgctttcatgctttgatgacataagtgtacaaatggtatcatactttgtttcctattgcaacatttcttttctcattcaatattatatatttgagattgatccattttaatagtattacatcataggagatttcacaacttatttattcactctctcatgtatggtcattccagtattttgctcttgcaaatgttgctacaacgagcattgttgatcatgctcccttttgcacacagataagtttctctagggtggaaatggaattgattgctaagtcataggtatggatctccttcttttctagaaagagccaaatcatttttcaagtttttaaggtattatataaatacctgcatttcccccaaggacattttacgtaaatgatgccagttaatatttgtgagtgcttcctatgggccaggaactgtcctaagggttttatatgattccacacatttgatcctcaactattcatttgacaagtgaggaaactgagattcagagaacttgaggatcttggccaaggtcttatagcaagtgccggagcccactcaaacccctcggcagtgtcgttctcaagccctctctcttaaccccaggctgtgctctaggtgctagaaagacactacccatgccagtttatagggatataaaggcagcggctatttaggctgtaagaaaactccaacaaaccgaagcagccttcctagagcattgctgttgtacagataggaagaagaaccagatggttgctcaatgtgtccaaggtccgcccgtcagtgactgatccaagactaaattccaggctctagacgcacatggcagccaggttctttgctccctggctctcgctgtctcactctcccttgctccctccttccctgtgtattcctgaaggcatatagctacatcttcatgtgcttttaatttcttttagcctagagtagacgctcataatagaaaggtcaaataaaattttttaggagtagtaatggatgtaatcttgtacatgtacatgttaattgcagcactttaatccccattctaagtaccaaactttccggattaatttcctgcatctgttggtaacacgggactcagtcttctgaccagattctttgcccaagggccctcatttactaatgagtaatcactgcaatttcagagaaaatgctactggtacactcatgtttgaacattcatcaaatatgacgtgagcccagttaggagagatgttagcgtccttagcctacaaataagggcatagaattaaatctccccacgctataattttgttggggttattacttgcatcaatgtttggaacagttggtgataaaacgtttcatggtcttacagctcagtagataggagcatgtcatgagtcaggcttaccaaaggacttactgcagacttacttccccttgcctcctgtgattcaagccaattttgcaaagagaagacagaggtggaagaggaagtcccttcagcaggaatgcatttctctttgtgcacatatcacagacacacagcactgacacactaattatagctttaggttgagcatttccagtttctgcattttgtttgcaaacagcccattatttctatcctgtgtgctggaaaaacacaaaatgaagcagtctaatcactactgtttctggtaggtccagctgtctacctgtctcccctcttttggttttatttttttcagggtgggcctgtaactcctcttctatccccacccgattttgttttttggaatctttctaacctgcctgcagaccaggggttgcagttccagctttccatgatcttacctgtgttcagccttatctattttgtattgaaagaaacagtcaacacagtcaaatcctttataccttccttaagactgcactggtgtggcctacatagccacctgtgtgccagctgctgtttgtcactaggaagacagggtgggatgtgcgggtggtatgaccgaggtgtgaagaatctcagggttggctgtgtcagtgaaggagtgaacgggcactttggggtcacctgaactgggagaactaagttctcaagcagcaaaaacagaggcacaaaagtggataaaaacccaatagtgcagacctggagctaggcttcttctctcagtggtggcacagaaaaggatgaaagtctctgaaatgtgcacctgtgattcaggttgccacccactgaaaaatcatgattcaagatctctcctcctcataaaccttttttttttttccctgcctgcagcctaagatagaattaggaagtcaagaaaggctctagatgactttcagagtgttttttgtttgtttgttttttctttttgagacagtctcgctctatcatctaggctggagtgcagtggcatggtatcgtctcactacaacctctgtctcccaggttcaagtgattctcctgcctcagcctcctagcagctgagattacaagtgcctggctaatttttgtatttttaatagagacagggtttcaccatgttggtcgggctgtctcaaactcctgacctcaggtgatctgcccacctcggcctcccaaagtgctgggattacaggcgtgagccaccacgcctggcccagaggtttgttttttttgttttgtttttgtttttgtttttccagaattagcacatcttctcttctctgggtcatttttctcttaaatcagagattgcaaaatgtggtccaagggtcaaatccagcctggagtcccctgttttggtaatgtttccttgtaacacagccacccccattttttacaggctgtctgtggctgcttttgtgatacgatgcaggagttgagaagttggacagagaccatatagtttaaaatatttaccaccctagcctttgcagaaagttcgcccaccccttagagtacagaaaaagaaagatttcagagatgtcagtttgggaaggtccttgaaaagtcacttggcaaagaaaagttgtgagaagaaggttgatgttttgtcaaagaaatgcaacgatgacagatgccaacctgccttttcttccagcggcagaggacctcaggccgtggtgtgcatgcccgtgtatcggtgtgggtatgtgcacctgcacacatgtgtgcttacacgcagctcaaaacggtgccaccctgtccagagttattttggccatcatggttcaaatcaacagacttttctggaaagcttctgcacacatgccatgctcagaacaggaggtgcaaagatgggaaaggattctgcctgatatgcaaatagtgaccgaaaacaaatagtaaggagtgaggctgatggagagctaggggaaacaactcactgtccctgggagggctgcagaggacccagcacaggcgttctggggtgtaatcttccttccattctcgtgagagaagctgagtggaaaccaagagcctggcttttcagtgaggacatgaagcctctgatagttgccttccctctggaggtgaagcagtcctggaagaaaacatattcttacctcaaattccaaaacaacatgtggggactctgttgagaagcctgggtgacctagggctgacgtggtagaatccagactgattctgcttctgctttctcttaaagtcagctcagttttcccaatttttatctttttttttttcagggtctctctctgtcaccccagcaagagtgcagggctcactgcagccttgacctcccaggcccaagcaatgcccccacctcagcctcccaggtagctaggattacgattgcaccccaccatggttttcccaatcttataactaattagatccgctcatcacgtgtcctgcaagcatgcagtggcatgtcacagtgcccatctgacagcagggcagggtcgtttgttgagagaaacccactgaggaggaaataaattaatgtccatcctttgctcccatcacctccagctgcaccatccttcaccaggacccatcagagcttccccggggatgctgccctgtggttctcggggaagctgagagctctatgttgcatcttccagggcacctgtggtctccgaagtgttggctgcaagaatggctaagcagcgcactctcttcagacaagaatagtattttaattgccgacagaatgcagatatcgtttccactattgcctctgacacttaattttaggccgggcatggtgactcatgccagtaatcccagcctttagagaggctgagcctggaggactgcctgaggctagaagtttgagaccagccctggcaacatggtgagaccctgtctttaccaaaaaaagaagaaggagaaggagaaattaaaattagccaggcatggtggtgcatgcctgtagtcccaggtactcaggaggctgaggcaggaggccaggagtttgaggttacaagtgagctatgattgtaccactgcactccagccttggcaatggagagagaccctgtctcagaaaaagaaaaaaaattaaaaaatgaaaaaaagaagaagaaatgtaagtttaggcatcttgaaggcaggagattttgactggtaatggtggaaggattttgcaaaactccatgagttgacctcattcctcagaaattccattgagaatggagggtgttatgtgaaaatccgaatcacaggggatggcttcgagacatgtggaaagaatgccgccattacatatgcacgcgtagtgtttgccccagaggaggcttttgaaaagttcatctacaatgtgctaaagtcgagttttgcagtgacttcctagcgcatttagactgggcatagtttacattactgagtatttatcagccagcaaatcaaagccagaaataggttactcctttgtggagcaggagacagtgactgtcctgggaggaagtgactgtcacagcaatggattcctttagtagcatcttcactgtgtattcaccgggtacccaccgtgttagcgatgacagccaccctgtatcaggtactcccaagtgtccgttcccctgttactgagcactttacaggcactcttgttttgtgctcacagtaaccattgagggagatgaggcacagaatatgaagttagttgccaaaagttgccagagctgggatttgggctccaggtggactgactttagaggctgtgccctccatccttgccctgaacaacctcctgtgaagaaatcagtgtgaatgaatgaatgaatgaatgaatgaatgaatgaataagacctgaagaggcaggcaggctctgggagatgcagagacaacttctgcccagtttgtgctcaggttgtggagacaaggcttcctacgagatgcacacacagaaatttggcagaatgggtaagtggatagcacacagtatgaggtgggtccaatgactgctgagattccctctgtcctccacccacactttctcaacggtgtccttctcagaagagaacctgcttcttcgaccggcctggtaggaacagcactcaccacccatttgtgtgccagtacaggtaagtaagagtgctcccggccgcccttcagccgtggtgctcaatctgctgcatgcatcaccttagccaatcctcacgtcaatcccactaggtagggattatcactgcagttatatagacaagggacctgtggctcagggaggttaagctacttgccagatctcatggctaagaagtggcagaaccaggattcatgcaatggtgtggccgtccttcaaatcctgtgaacctcccatgggaacctcccatgacatcttgtgtctcccctggatatacatccgtaccatgacgggttttcttttttcctggtgggaaagggcagctgggggtgagaatgctccagagagtggcagaatggagctatggacatgaaagtatttggatcgttgggaagtgcagaggtcagctccgcacacacttcctgggactttgcagtcaatggttactgaagttacttaatacccacttgtcccacgactggtgagtcccgcctattgcctgctgtcctgtggtgcagctgctgtttgtccatctccagggccaccaaagcccgtctggattgtgattcaaggtgtaagaggacatggaaaaagaactgatttgtgttgtatgagtttagtttaacttgattacaggaaactgttggtgggtgaatgtaggatttcattgcgtataaacatttcagagacaagtccctttcagctactttctacttgggaatacttgtgaggtttttcacctaaggcttccccgtaatgattttgtcctgatgattcattccttaattagtggtattttattgccgctttgccacagagctttcaaaaccatcacctcctcctcctcctctggaaaacgtgcacagactttgcccacatttaatcatgccatccccaccctttctagtctttcttcaaacttctaccagttcctgtgtttctgagaggagcccaagtcaaacactatgagataaacatcaagagcttaaaatgaatgcatgttcaaaaaatatgctggtctctgattccaaacatggctactgctaacccattgaagacccatcaaagacctgactattctgaattgttttaatagcagtgaggggtgagtcgatgtctcaggagaggatggcccagacctaggtaatgtgtgtcccgtcccccgacccagtgagcacgtgtgtgcatctgtgggtgtgtgcgtgtgtgggtgtgtgtaggtgtgtgtgtgtgggtgtgtgcgtatgtgggggtgtgtgtgggtgtgtgcatgtctgggtgtgtgggtgtgtatgtgtgcgtgcgcgtgtgggggtgtgtgcccgtgggtgtgtgtgggcgtgtgcatgtgtggatgtgtggcaccatgtgtgtgggtgtgcgtgggtgtgttcctgtgtgggtgtgtgggtgtgtgtgcacgtgtgtgggtgtgtgctgtgcgtgtgggtgtgtgggtgtgtgcatgtttggcaccgtgtgtgtgggtgtgcgtgtgtgtgtgtgggtgtgtgcatgtgtgagtatgtgcatgtgtgtgcaagcgtctggcacacggtgtttttgactggactgaggttgtggtaccagagtccagaagacagacagttgaagttgtgtcgtggagggacactgacatgaaatctggcaagtcatgtccaaaccaggtcactaatcaattgtgagcagagagcagtgagcagagggcagcagctatgtgcagagccagaggccggggttcgaatgcacaggagccacgtggacactgctgcaggctgcccgggcacccagccgcagattacctgtgttacctcatgcctttttttttttttttgagactgagtctcactctgtcgcccaggctggagtgcaggggcgcgatctcggctcactgcaagctccgcctcccgggttcacgccattctcctgcctcagcctcccgagcagctgggactacaggcgcccgccaccacacccggctaattttttgtatttttagtagagacggggtttccccatgttggccaggatggtctccatctcctgacctcgtgatccgcccgcctcggcctcccaaagtgctgggatcacaggcgtgagccaccgcgcccggacccattgcctcatttcttcctccagccgcctgtgggtggggactgttcccgctgcagtctcctgggtgagagatgagggagctgctggtgagaggcggttgccccatcacctaagctcgtgaccaggggagggggaaaagcatcactgctcaggcaggagcccccatgcctcctgcttggggttcacttaaaggcacggcttagagagattctatcgaccaaaggatggaaagagccacggagaaagtatctttccggtttttgctttcctctgtgttccgtttccttcccatttacacaggtgcctttagcacgtagatattcacagctctctagagtcaccaactcctcgaatatccctggggtcctggcagaaagcggatggcgcgctgcgtctaacggagagtttttggaaaggactgtttacaaaagctgtcgcaggtgcaggcaagccgtggtgcgcagtgctcctgccagccgctggggaggcctgagggcaggaggggaagccacgaccaccaccccgagagggaggacccgggagcatcagctgagaggcatcatgggacaggagccaggaggacaagtgccctgtcctctcccatctccttctgcgctctccaagggctgagcccatcctgaagccagaaggaagcctgtcgaggcagcttgcatccgtctgcctcctggcgcagagcagagtagagagattgaagagtggacctggacgggcaagtgttcatagaaggcgcacagtacgagcatctcatgaaaacagtgggccctgctgctcagaaaaatgcccaaacacaccaaatgtggcatatgttttcaggggatccatataccccttttagccagtctctggaccagactgtagagtaagagtctgatttagatcgatgggaatgtttgtttgtttgtttgtttgtttgtttccctcctgataaaaaatcctggggtttgtgctctcctttaagtctgtaacagctgagtgaacaaatggcctgcacgccggctcccaggtcagatgtccagcaagcagacgcttcttttcttgtttctctgtctcaagggagcaagtaagtccagaagaagaaaggatctggtgaaggaggctgcaacccgaagttattttaagagagtgttgaaaatgagggctatctaaagcagaatgtgtggctgggatttacaaggtaaatcaaagcagctgtaggaaggaaagaaaagattttcaatgacaaacgttttcctttttacttgttcttttgaaagaaaggggaatgtgtgggcagacagttgtgaggatcttgacttaaatacttgactgccttttcacatgcatgctttaaaaactctctggttccggctgggcgtggtggctcacgcctgtaatcccagcactttaggaggccaaagcaggtggatcacttcaggtcaggagttcgagaccagcctggccaacatggtgaaaccctgtctccactaaaaatacaaaaattagcagggcgtggtggtgagtgcctgtaatcccagctacttgggaggctgcggcacgagaattgcttgaacccaggggacagaggttgccgtgagctgagatggcgccaccgcactccagcctgggcaacagactccatctcaaaaagaaagacaaaccaacaaaaagaaaaacacaaaaactttctggtttcttaaatgaatgacactcacttcgagaagaaggcccgtctaacctcagccttatttttgcattcagctagataataaagtcactcaaggtcttgggtccaaccagatgctaaaaatggctgtttttgctcaacactataagattggaagtcagggagctttggactttggacatttggaactgaggattcacctagaacatcaacgtttttgaacattccataataaaataaatcctgttaactcttaggcatttatacccccaatgtggtgggataaaaggatgaggaaaaaagtggcaccaagatgatgcgagctctttattctgtgtttcggtctcatcccattcagatgcttcttcatggaacatttccaggcagtggtgcctgatattcttcatttcttgaaaattctggttttgttgccctgagagtttgagatgaaaatctggttcctggagaaaagggtcttcttctatcagtgaagcccgtcagtgtttggttctggagtgactgcaaacaaaaagagccctccaagtctcagctcttcccctctctgctggtagatggaaatctctggatctgaattcctaatgggccccaccagtctgatattttaattagtctggtttaaacatggttggaggccgggcgcggtggctcatgcctgtaatctcagcactttgggaggctgaggtgggcggatcacttgaggtcaggagtttgagaccagcctggccaacatggtgaaaccccatctctactaaaaatacaaaaattagttggccatggcggtgtgtgcctgtaatcccagctactagggaggctgaggcaggagaatcacttgaacccaggaggtggaggttgcagtgagctgagatcttgccactgcattccagcctgggcaacagagtcataaaaaaaaaaagtgggggttggggggttggcagtggccttcacacacagcagtctctgcctttaataatggtttaaatcatgtgttagatctaggccctttggtgagagccaggttgaacacccctgaagcatttgctctttgatctatggcctcctattcctttgaactttcccagaaagcagggtgggggtggggatggggaacactaacccagaattctttaaatttctttctaatgatttggaatgatcagaaacttttaaaccaacttcatttccaccttccagccatgcttatccatcgtaagactatttttatcttccataagaacccattctccagtgactcttagatggaaaacacaacactacagagttaccataaaccacttttccttaattgctgacatggaaccagacagaggggggtcattggtttggagaaggagagggagggagaatatctacgccctctctgtccccttcccagacacctcattgcctctgaggattctcttcccttcactctcatcacaaaagaggtaattaccttatttcaggcatcctttttatagagcaggcagcagcctgtcacggtagtagcatttcactcttccaagaatggaaccattgcacaatgtcccaggagtcatttgtgatttttatgagaacctgaagaggttaaagaaaagaacagaaaaataagaaagcctttgctgagaagaagggagctgttagccaaaagagggaatttgggctgagaaattattgtctgaaatacttacatcttagagagagagagagagagagagaggtgagggaggggctttgttattgaattgagtgacatttctctttattataaagttataacgtccggcagtagaactgccagtaaaactcgatctggagtgttttctttccccctcgctatgctcttttagcagtttgcatctggactgttaaattaagggttcttgcatgggaaatacttcttattccttcagcaagtgaaactacttgctaaagtaattatttttaaatgcaaatatatatacacacataccttgtgtgtatgtatttttaaatatttacacacaatatatattcatgtatatgtatgtatgttgtatttttgtggttttgtgttttaacatcagctgcggtagaaagagaagggtggctctgctaagagtccctcctcaactggcctctggctgcaacgtaaatgacctcccttgttccctaccagcatggctggagcaaaaacgccagagtctcacgtacaaacattacctggagtcttcctactgcactcctgcactgtggcatccagagaaacagcgtcacttggggagaatgtcatgcactcctgcactgtggcatccagagaaacagcgtcactcaggggagaatgtcaggcagggatgagctgccttgacttgaaatggtcttgcctctcatctcaattaaaatcaagccattaactggctttaatgtagagattttgtggttcagttttcttcagtggtatccattataaaaaaagatgggggttataggtagcagaactgattggcatagttgtcaggcatatagtatgtattattaatatttaatatgtattattaatgttccctacctatagtgagagctatcctggcttaatcagttatccttcactccaggacgaaaccatgctttctgtggttacctgaattccaggtggggctaagcacagctaagagtatctggtagcctcttcaagtggcttttgtatcacccaaaccttttaaaaactgccacacaaactgataaaaacgtatacttctgtctatccttgattgaatgtaattgtcactatttattttaaagaaatggacaacttagagccctattgcaacacatcccaaacccagctcacttaaaccattaatcaaaacatttttcctccctacctgtggtctgtaaggaggatacaatctagtctctgattgcacaattaaacaggtgcagaaagcagtctatggattcatgccaaatgagtggtactggaagggaattctatgggagttcaaagaaaccggaggtcacagtagatcagagttggttggcgggagtctcgggggagaaatggggtttgacgtaggccttgaaagaaccgataggattcagacaaacctgagtaatgggagggtgttccgagccacacacactgattgttcagtttggtttgctcagctagaggacgtgttgggaagatgggtctgattggaggtgacgttgacacccagacttagattctaagggcagggggagttccctgaaggattttaagtgccaggggcctggtagtgctcgtgtgttaggcagaagggaggcgaactaggctgtcacaatcatctagattggagttactgagaatctggatcgggtggacatgaaaagaaagcagtggattcaagttacaaaggaagaattggcaaggggtggcaaaacagtcactgcttggaaaaaccatttttctgaagcataatgccactttgtttttgtttttgtttttgagatggagtctcactctgtcgcccaggctggagtgcagtggtgcgatctcggctcactgcaagctccgcctcccgggttcacgccattctcctgcctcagcctcccgagtagctgggaccacaggcacccgccaccacgcccggctaattttttgtatttttagtagagacagggtttcaccgagttagccaggatggtctccatctcctgaccttgtgatctgcccgcctcggcctcccaaagtgctgggattacaggcgtgagccaccacgcccggccaccactttgacccctgtctttgctctgtgtctcctgaaggacaagaaggccatcgtgctaggcttcggaattccctgcctattcgtgcataatttgaaatcatctctatgtagctttcagatgctcatttccttctggactccctagtacaatttcatcaatttcatattctctctctctctcctctcataggtatatagtatatattttacttgatgactgactcaagaattttcagatgggttctgatcttgtttagctggaagcattttctagagagccaaagccattgttattttggcttctacatttattgtcgtatattcaagcagaacagtgtaaaaatgattaccaaagttgagcctattatttagattttgatagtatgtgtgtgtgtgtgtgtatatatatatatatttgagaaggagttttgccctgtcacctagactggagtacagtggcaccatctcggctcactgcaacctccacctcccaggttcgtgcagttctcctgccttggcctcccgagtagctgggattacaggcatgcaccaccacgcccagctaatttttattgtatttatagtagagacggggtttcatcatgtcggccaggctggtcttgaactcctgacctcaggtgatccacccacctcggcctcccaaagtgctgggattacaggtgtgagctaccacacctggcctgatagttatgtttttaactctagatgactaaaagacacctataaagatatagaagttaagacaaaagtcacaattatgttgacaactgctgttacagtgttttcaatatatttatccaatagaaaagttttattttactgcacaataatatgttctattaaattaataaaaacgtactcatgagtgacttcttgtcatacagatctctatatctcttagagctgtatgtcggcgttttctctctggatatataatatacatattaatcaattcattcattgagcctgtgcttggcatgattccaggtgcttcagtataatagagcaataaagacaagccccctgctctcttagatcttacttttttttttttttgaaatggaattttgctcttgtctcccaggctggagtgcaatggcacgatctcggctcactgcaacctccacctcccgggttcaagtgattctcctgcctcagcctcccgagtagctgagattacaggcgcccgccaccacacccagctagtttttgtatttttagtagagatggggtttcaccatgttggccaggctggtctcaagctcctgacctcagatgatccgcccacctcggcttctcaaagtgctgggattacaggcgtgagccactgcgcccagtcagatcttacattctgatagagggatatagacaataaacaagccagaaaatacctgccagtcaaaaagctgtgatgggaaccagccaggcaaagatctagagggagagcaccaggcctgtctccacttatgtgagacgtacagaaacacacagcgccttgcccgtgggaggttctcaccacgtatttattgaggaataaatgagtgaatggatgtattcattggcctgcttgtaaaaccttcaccagtggactcttggcttttagaactttattacaggttgagtaatatctgaaatatcccttattcagaacacttgaaaccagaggtgtcttggattttgaattttggggggtttggaaatatttctactgtacttatatttatcaagtgagcaccctaaaatgaaaatctgaagtcctgaatgctgcagtgagcattctctttgagcatcatgctggtgcttaaaaagttttggattctggagcattttgggttagggatcttcaaccggtatgctaacaatagtgatcttatgtagtattttccctccaaagagatttgagagagaaataagtggctgccgtggttggccgtctttctctggctcacttcaccttgttgccctcggataactccagtgaactccttcttacttttcaaggccatggctcttccaagcaacctccctgagccccttgggctgggtcaggagggttccccaggcctgcatggacctacaatgtgctactgaaatgatcatttatgtgtctgtctctttctctaaacagtgggctcccccagactgggcacaaagttatttacctaatgtagccaagaggtaggtgtgcaagaattgttttctgttgagatgaaaatcaccaagcctggtcatttgctttctgtgtagacagcagtgtgttgttcacttaggactctgctctctgtctcgtgcaacttaccctttatttagggaaaatgaacaatctgtaaacaataagagaacactggcaaatcaatacagtcaagacctgtgggaaaatgtagaggtgtcaagagtaagagaataagctgagggagcaggtgtggatcaccatggtctcctttgacttgctcaataaagaccctctgaccaaaggttagctgcaaacgcctttgttttggagggctagtatgcagtggtttcgtgatgtgtcttttatatggtctcatggttttcaatttcttaattgatgtttctgatttacctgaaagctttaaatgttcatgatcttggcttggtacacattagacattaaggtttacaaccgatgcctgtcattgccatttgaatgtgttggtgacattcctggtgtggcaagctaggcgagtgtgcccccatcgacaaaagaggctgaattctatattctgcactatatggactgcctttctctttcactcacttgctttttaaatgacacaattcatcccattcttaatgggggttgggggagaaaggaagaaggaaacgaaagcaagcaaaagaaccactcagtgcccgcaactgttattatgatcttggtatatagctctaaatactttcaaaaatatacttgaaatactttcataggttttacaacaaataggattatacaaccaattttatcacagtgaatttccaagtcaataactgcttttcagactatgttccaaggaggggccggggttgcccagctcaagagaacaggaatccctgcaaagggccaggggcccgtcagtggctcctcctcagtgcagctctgctctctcggtttttttattgatacataatagaggtacatattttgggggtgcatgtgataatttaatacgttcatatcattgtaaagatccaattggtgtcattgggatacccattaccttaaatatttcccctttctttatgctagaaacatttgagttcttctgttctagctattttgaaatatacaatagattattgtaaactgtagtcacctactgatctgtcaaacagtaggtccttttttttttttttttgagatggagtctcgccctgtcacccagtctggagtgcagtggcatgatctcagctcactgcaacctctgcctcccgggttcaagtcattctcctgcctcagcctcccgagtggctgggactacaggtgcccgccaccacatctggctaattttttgtatttttagtagagatggggtttcaccacattagccaagatggtcttgatctcctgacctcgtgatccacctgcctcagcctcccaaagtgctgggattacaggcgtgagccactgctcctggcttttttttgttgttgtttttttttttttggagtctcactctgtcgcctgggctggagtgcaatggtgcgatcttggctcactgcaacctccacctccctggttccagtgattctcctgcctcagcctcccgagtagctggaattacaggcatgcgccatcatgcctggcttattttttgcatttttagtagagatggggtttcaccatgttggccaggctggtcttgaactcctgacttcaggtgatccgcctgccttggcctcccaaagtgctgggattacagacgtgagccaccgcacgcagcctcaaacactgggtcttatttcttctagcacactgtatacttgtacccactaaacaacttctcttcgtctcccatccccgctgcccatcccagcctctggtaaccacccatctactctctgtcttcaccaactccacttgtttagttcccaaatatgagtgagaacgtgtgatatttgtctttctgtgcctggttcatttcacttcccataatgacctctagttccatgcatgttgtacagctcttctctcattggaatatattttgtaaaacaaacaaaaaaaaattgggggtatgaaaggttttcactgctcatataaatgacaacttgtaaactactgtgaatagcaatattttcattgagtagagtgctaccaatatgcccattcagaatgaaaaactctgacaaacagctctgtccgtatatccttatcactcactgacaatcttttgattggcactggagcacccatctgctgggttttgtggagactgtggccatctctgccttttagactgagctgctcagacagttgacccaacaccggctgcctccttgccactgaatcggaatgaggtcatacttgtacatgcttcttggaaggttttcaggcctcagctctactgagcgaagacttggttgagtaacaagtgaggaggaaactgtagggttccattgtttacaatggggacagcctgcggcaccactagacattctgaggcgggtcctggttgggggtcagaaggtcattggataggcgggaaaaaaaatcattgcaaggttatgattgcaccagtgcattccagcctgggcgacagagccagactccatctcttacaaataaatcagaggaatgggagaaaatatttacaaatcatgcatttgatatttctccaatcatataccggtggccaataagcacacgaaaagatgcttaacatcattagtcattaggaaaatgcaaataaaaaccacaatgagatgccacttcaaaccgtctgggatgactataatcaaaaagacagatcgtgcattgggggcattttgagcattggtgaggatgtggagaagctggaacagtctatacgttgtttgtgggaatgtaaaacagggcagccgctgtggcacagtctggctgttcctcaaaagcttaaacacagagttaccaaatgatctaacaattccattcttagggatatacccaagagaactgaaaacatacatccacacaaacattagtacacgaatgttcatggcagcgttagtcaaaatagccaaaatggaggaagtaacccaaaggtctatccctgatgcatgaataaacaatgtggtgtatttgcacaatggaaagttattcgccacaaaaaggaataaagtgctgatgcatgctgccatgtggatggaccttgtaaacgttctggtagctgaaataagccagatacaaaaggccacatatagtaaactgcgtttatatgaaatgtccaaaataggcaaaactatagagacagaaaatacatttgtggttgcctagaactgggggtgttgagtgagacgaggagtgagtgttaaagggtgtgagtgaggaagatattccgtgttccatgatgattacatcattacatgcatagtgattgcacaactctgtgaatatatgaaaaatcacttagctgtatacttatggtgagctttatgttatgtgaattttatctcaatattaattttaaaatccaatgaagggcaaatttatattgtttttggcttttaagaaactgtcttaaaagacacatttatttatttatttatttatttatttatttacttacttacttacttacttacttgagacagggtcttgctctgtcacccaggctgaagtgcagtggcgtgaccttggctcactgcagccttgacctcccgggctcaagtgatgctcacacctcagcctcccgagtagttgagaccacagacacatgccatcatgcccagcgattttttgtagacatggggtttcaccatgttgcccaggctggtctgaactcttgggctcaagtgatccgcctgccttagcctcccaaagtgctgggattacagacgagagccaccgcacctggccaccccttttatactttgttaatggagaagtaaataaacagccagggtgtaaacaatacatgcacccccatagttcaaagggacaatggagcatatgtgttgatgtgtctgagaaaaacagaaaaaatgcttgtccctggaatgatggaaagaattgttacaccttgagaggagaggtcaagggtggaagtctgaaacaggtgtgggagatgatatttctaagagtgagccagtacgtttctggcaaaataaagactttagcaggctactagtttgtaaaaattaaactgcaaaactggagctggtttcacccttattttttaattatgtgggattagtcatttgtgcttgatgctccctcttagctcagccccatttctcttttctaaataaaaaacacttggttctaaatcctggcttagaaagcatatttttgaagctcaagacagaaaattcatttgtttgtgcattcagcaaatacttttcaagcatgcactgtgtgccgggcactgtcccaggcacctgagacacactggggaaccaagacgaagattcctgccttcaggcagcttagatcctggtgggggtgggggataggaaggggcagagacagatcatccaccacaaacacagtaggttagtcaatcctgtggcagattggaaggtgataaatgctatggagaaaaaagaacaaggtagcgcaggtacggaagtggaatggtgcaggtggcatgagtagccagggtccataacatggtgagatttgggcagaggcatagaggaagtgggggagctgaaccaagcaggtgtctggatatctctgagggaaaagcattcccagcagagggaacagcaaggttaaaggtttgaagggagagcgggcctgtcatgttcaaggaacagcaaggagtccaggttggctggaaaagagaccgaatggtagcagagcaagtcggggaagtctcaggagggtcagagtctatagggcctaggaggccattgtaagtacttggcctttttaacaatttaaatgtaattcatataccataatatttgcccctttgaggcatataatttactggtttttagtctagtcatcatactgtgcaagcagaacattttcttcaccccaaaaataaactttataccataaacacacacccacacacgtccctcttccagccgctggcacccactcatcaacattctggctctacggacttgcctattctggacatttcatattaatggaatcatacaatacgtgaacttctgtgtctgctttctttcacgtcacataatggtttcaaagtccatccatgttgtaacaaacattattagcacctattcctttctgtgtctgactagtattccatggtatggatagaccagtttttggtgatgcattcatcagtggatggacatctgggttttcccacgtttggctgttgtgagtgatgctgtgatgaacgttcatatccacgtttctgtgggggtgtgtttttctttcttgggtgtctgccgaggagtggaaggacttgagcattgcttttctcctgtgtgaaatgggaaccatcgcagtgttttcaccaggatctgactcgcatttttttttttttttgagacggagtcttgctctgtcgcccaggctggagtgcggtggcgcgatctcggctcactgcaagctccgcctcccgggttcacgccattctcctgcctcagcctcccgagtagctgggactacaccacgtctggctaattttttatatttgtagtacagatggggtttcaccgtgttagccaggatggtctcgatctcctgacttgtggtccacccgtatcggcctcccaaagtgctgggatgacaggcgtgagccaccgcgcccggccctgacttgcattttaaaagggtcgctttggctgcctgttgggtatcgactgtgggtgaacagtgagtagcaggaaggaaaccaggcaggatgtgatggcagcgacgtgggtgagagtggtgatggatcagaccagggtgggagcagtgaaggggttgacagattctggatgtattttgaagatagccaataaaattcttgattactgtgagagaaagtaaggttgtgagaatcagcccgaggattttggcataacctgttggaaagatggagctgccattaaatgagatggggaggggtcctgagggatcaggagcgcagctgaatgcaccgaggtggagatgcctactagacatcaagaggagacgtccagcagagggctggatggatgagtctggaattcaggaagcagcctgggctgcagatataaatttgggaatcattggcatctagatggcatttagaaccctgtaactgagtaagatcactaaggctcccatttattcaaaggacaaaacaacataaatgttgacagagagtaataatcttttctatttattgagttccaacagtgagctcctgttatcactaaaaacagacatcgcagataagcttctccagaaatacatatttcaacctggttgagctataggcacccagggtatatctacagaagccaggtattaatatcttagaggcatatgcatcaatatcgtgtgaagtcttttttgttagctcttttctgattatgctttcagagtttttttgttgttgttgttatatttttgttctcccatgtataccttggtttgtgatcagtgtgtaaaggaggaggaatggttgtttggttgagacatttgcaaatagtaagcagtcaccttacctaacttggctaatttgcattgtttccatacagagaatgtagtttgacagtcaaggatgatagaaagtcagaggatgatagaaaacaatcctttcttcatacagattaagaagaagaaatgaataatctaaagaaagaaataacaacaagagacagatgggatgctgactggtccagaaaccgtcaggtagcaacagttgcaaatctgagggagttcagcctggagaagaccaaggggagagagtagaaaggatactcaaatatttgaaaggacacaggcttcttttctgttgctctatatagaactaggattcgtggataaggattgcaaatagacaaatttccacttaaataagaaaaaactttcaaataattaaagctgcccggccaggtgcagtggctcacacttataatcccaacactttgggaggctgaggcaggtggatcgcttgagcccaggagtttaggaccagcctgggcaacatggcgtgaccctgtctctccaaacaaacaaacaaacaacaaacaaaaaactagcctagtgtggtagcatgcacctgtagtccgagctacttgggaggctgatgagggaggatcacttgagcctgggaagtcagggctgcagtgagccatgaccgtgccactgcactccagcctgagcaacaaagaccctgtctcgggggggaggaaagaaaaaaaactgccgaactacatgcagggtgggattgggcatggtacctgggccagcctgttggcataacatgtggaagcgggtgacccacagtcaggggtcagtctgagggactgccatactgggctagggcctctgagtgctctgccagcttaggggttccatgattctcagcagatttccagcaggtgtttgagggtttctgcattcagtgacataaacaggccctcgtgcttctgtgggttataggccagcttggtaccgtataaccagtacatcaagagttgaagtgttgcactaatgctttccaagagtcagagctggcagagtgaccgggtatacaggcagagtttgtactctttccttttagaaacacactctgctgtctgtacctgaattgttctcactctgtggaggacttgggattcttgatgttatttatcttatgtgttccaagtgctaagtagtttaatcctaatacttttaaaatgttaaaaaaaaaaaaaaaagagagagagaaatgtttaaagtttggatagaaacccttagaatcattaaatattctcagtgaaagggaccacagaggtcatctgggcccatttcctcattttatagaaaaggagtctgcaagatccagacagcagttcacccagattagttggttgattcaaactttcccttcctatttctctctacagtgttttatctacaattatattatatttaagatttggcaacaatgaccatatgagaagtccttgtaatatgccaggcactgtgctggccgtgcgttgtgcgtgcattttcctatttaaaatgccacctataagtgccatctttggaatatttgtcctttagaaagaagcatctgcttcaaaccaatggcagagacaaaatggcttttctcttatctttactactgtgtggatttctccataaacaagaactggcaaagggcctcataacagctctgtggccctctctgggctcagagaatgcccgtagccaccagcccagctggcaacaaatggttgcaggttctgtttccatgtttcagtcaatctgtctagagaacaatggaactcctgaaccattcccgtgctcaaatgtaacgtaaaaaggacaatataaaatatcaggcttctgtgtttgaactgctcccctggggaaaggagcatggtggttgggaactcagcattaaacaaggaaactcgatgtgtatccagcatcactgagtgctcaggtctgcagactgcagagagatgtaatgcttattcctgttcccacatctttgatctttttgcgtgaagctaatatttgagaattctttatttccctggagtgtcaaacctcctgtcaactcgccataaagacaaggaagagatttcctttttcaacaagtgaggacagatgtggccaagcgttgattattattgtaagagatgaatacaaatgttatcattactgagtgctaagctttgtttatttcttcagaattcccctagtgcctctgggctgggaatctcacccacagaccttgatcaatgtcccctggcactttgaacagtccttggttggacctgacagcacgctccagtcttacctttcactggtagcacagcagcgtctaaccgatagggactcttcttggctctgtgtgtacttttaccatcctagataatgaagaccagagccaaggaagagaaagataacaaacgagagagcatatttgattctaggagatttgactgaagatggagatggtcaggtaggcaattcaatggggaaagacacttattttttatttattgacttattttttgatacagagtcttgctctgtcacccaggctggagtgcagtggcacgatctcggctccctgcaacctctgcctcctgagttcaagccattctcctgcctcagccttcctagtagctgggactgcaggtgcgcaccaccatgcctggctaatttttgcatttttagtagacggggtttcaccatattgtccaaggtggtctcgaactcctgacctcgtgatcctcccgcctcagcctcccaaagtgctgggattacaggcatgagccaccatgcctggtcaagacactgatttttaagtaagaccttccaatgagtaatcctttataatcaacattagaactagacgagtattcagaaatgcatgttgttttatatgataacacaaaggactgaatacaaacatcattaaccaagctcttctgagagcttggggaaaaagctgcccgagggtaccctgctttgtgtgcatgtgatatgttccatctgcctgaaatgttcctttgaaataagaagcgagggcacagctgggtaggagagggttgggaaggggcccatggaggactcacctcactgatgtgctgtggaggttcgatgaatacattccccgcttccctcctacccagtgtggcctgatgatcacgactagtgttcctaccagtgaatggttcaccccgaggcaaatgcgttccctaaggaagatatgtgctgtgagtttccagttgtaagaagccagtggagacacccaggtagtctgtgttgttgaagcctcacgatctgggagggcggtgtgatgaatcccgggcagccacacacagtttccggcaataccacatttcatcaattccgtgttagaacattgagtccaagctgttggaaaaagcttccccttcaggtgtgaggaggcccaggcagcagatgccaggactcacactcctgggcatcatttattttggaagttggggaagcaggtgccggacaaagctctgggtcgtcttcttttgcatcccctccagatctcacagggtttcatgggtgccctgtgtttgatgttcagtgtggaatccaagagcctggtgaggagaagctgtctcagaaccagtcacaataaaaataatgatccacagttaacatgcatagagcatttgctttgtctcaaggcatgtgctgggtgcaccattttcatcctcacgggttctgctagtgtcctcatgcatagatgaggaaaacaaagcttagagaggtcaaaagagctgtccgaggtcacccagctggggttgcaatccaggtctgcctgaccccagagctccagctctgaacctctgtgcttcctgacctggcttcagtgcctgtgagtgtcacagtctcaccacagctggtgttaccatagctacttaacagctggtgttgggggagcggggaaagtgcagaaatgaagtttgcgttgttaacaagaaattttgctaattaattttggggggacacattgagcaagtccgcccaggtgcatgttcccacggtcccattccagtgggcagttgaatgcacacgtatgcatgaagggcgtgggtagtgaacttgtaacagcagaggaagcagaaggttaaaaggagaagctaaatacacctcagtgctggaacgttcattttgcagatttttgtcaggtttggcagagaaacctccaagctctaatcttacagggcgactacttgggaatcaatcgggaagcatatttcctgttactttagtgtagcgaaggcttctcctcgttcttttctactcttagtaatgtattagtaaaatgtgtttatgaaaatctgagtttcctcattccacctttatgtttttccttatgtctttataaaatctgtaagttagtttcctcattccacatttatgtttttcctcattctaatgccctctcttgaattgttagttctttgctttaatgacgctttgttaggcctgggctgatcccacgccatttttttatttcttctggtttgatttctgcttacacctcaaagatgtttaccttcatatcttctctttccctttacctgtgacctctctgccttgcctctcttaataagtgttaataatgctgggttacactttaactcactttgggcagtattctaaatcttaatctcttcaaaggaagtgctaatgaaatgtcccaccattatgtatctgtgttctcttacaaatgcagatgaagagccattcaatggagccacataactgcctttcccatcaagccttgaactgcaagtaaaggggcctgattgtgaggagtcagactcaccatctaggtcgcctgacagaggcccctcctaaccctgtccctggacactgtaacttctctaagacatttgatggtgaccaggcactccactcgtccatgtagtttctgggatggattcctctctggaatattagactgcctcacagattaaactgctaaaggaattttgcagcaaaatgaaatagattttggagcattgtttggagattggagatttggactttgttccaaattgcagatttggagattgttccaacaatttggagctgcttctcctccttcttctccttctccttcttctttcttctttcctcctcctccttctcctcttcctcttcttcttcttcttcttcatattattattattattattattattattcttttaattcttcaaaggagaagctcccaagagagtcgatttgtgtgagagggcctgtgactgggcccctgagagttgcttttttttgaattaactgggataacaaaagacaagcaggcatcttggtattttaagtgtgttttcccaatggaaatagaaataaacacaacactgaccaagtattcaacagagggatggctaaacaaactgtggggtatacatggaatagaatattattcagcaatgaaaaaggaatgtcattctgacacatgctacaacatggatgaaccttgaagacattctactaagaagccaggcacaaaaaggccaataatatataaatccacttaaataggggacctagaataggcaaattcatgcagacagaaatagtgattaccaggggatgtggggagggagaatgggtagttaatatttaatgggtacagagcttcagtttgggatatgaaaaagttgtggaacttgatagtggtgatggttgcaagacattgtgaatgcacttaatgccactgaattatacacttaaagatggttaaaatggtaagttttatgctatattcctagcatcattttttttttttttttgagacaaagtttcgctctgtcacccaggctggagtgcaatggcgtgatctcggctcactgcaacctccacctcccaggctcatgtgattctcctgccccagcctcccaagtacctgggattacaggcgcctgccaccactcctggctaacttttgtatttttagtagagacggggtttcgccatgttggccaggctggtctcagactcctgacctcaagtgatctgcccgcctcggcctcccagagtgctgggattacaggcgtgagccaccgtgcctggccttcaaaagtttttaaatgctgcatgtgaaggtaaccttaggagaaaactcttctgcttcttataaactggcgatgctgtgtagccgttttctgtgatcccagagcctgcagggcaaggctttcagagggcacacggtgccctttcacacgagtgatgctgacattttctccagagctgtgatgaataaataaatgaaggaaggagttaagattccttactactttgcatcttggtcaatagtcagtttgtcttctggttaaatatgagtatttttcgtggtggcaaccccgtcctccagctgctattcttacatatactggcatttacttaagtgagccctcttttcaaacaggacctgacctttcctaaaggagctttaaagaaatccatatttcctgattacaaatagaaaacagtgtgctttctcaagggttaatgtgggcaaagcaaagcaatgttggttctaatttaagcacatagtctttaggcttctttcgtaatagttcccttttgtccatttgggctgaaactgcttcagtaagcattttatgaaatcagtgagaaactccagaaaaaggcttctgcctctttttacgagggtcgtatttggagcaaaggagggaagaaaagcatctgtcaatttgataaatcattttcaggaaagaagaagtttcagcaaagtataagatagagttggcaatttaagggaggaaaaaaaaaagagaggagaccatcacatatagtgctatataaatggtttctatagagagcttttaaatatgtaaaataatttcatatatactatctcattagtgctcacggcaatccagtagttattatagagcttttaaatacgtaagataatttcatacatattatctcatttagtgctcacagcaatccagtaaagtagttattactttatgggtgaagaaatgaaggttcagctttattttatttcattatttattttacattttttattttaattaaatttttttttgggacgaggtctcgctctgtcacccaggctggagtgtagtagcaacaatcacagctcactgcagcctcggcctcccaggctcaagccatcctctcgcctcagtctcccaagtagctggaaccacaggcacatgccatcatgcctggctaacgtttccactttttgcagagacagggtctcgctgtgttgcccaggctgtggttcagctttaataagtggcttgctcaaggcctcacagcctgtaaaagaaactaaacttttgcagagcttccttcctgtccatagaactgtcccaaagtcggacgtcctgggcctgaggcacgggtttgtcacaaggggtggctcccaatagtaaaccttcatggctccctgtatgtgtggaatgagtctctaattgtggagaattgagaatggggggggtggttagagtcccttgaagtgttttgccagtgtagcttgtgtcgtgatacctctttgtgtcattgtaagtatgatcatgcccacatctttctgacatggtcttttgcatctgaatttgcagtttcacatttaacagatttaaacagattggtggcccatatgtatctaaaagagaaacatgtcatctccaggaccaactatatcatttgcagggctcagtgcaaaatgaaacagagggactctagctcaaaaatgattaaaagtgtcaatgtagcaacagcagagtaggcaaccaagcacagggcctacgtgctggccagtactctagcctggaaaagtgcaagaccttctgcaggtggaagcttcacagtgtgccttcagggtctgcttttgggctttctgccaatctggctacatacttaccctttgacacaatcaagggcaaagagttaaaggaaaggtagtcttgaggcctgaactctcttctaaccctattttttttcttcttttgagacagggtctcagtccatttgcccaggctggagtgcagtgacacaatctcagctcactgcagcctggacctcggctcaggtgattctcctacctacgcctcccgagtagctaggactacaggcacatgtcaccacatccagctaatttttttttttttttttgagacaagagtctcgctctgtctcatttgcatttgcatttcagacgcgccaggctggagtacagtggcgcgatatcggctcactgcaacctctgcctcccaggttcaagcaatcctcctgcctcagcctcctgagaagctgggattataggcgcctgccaccatgcccagctaattttgtatttttagtagagatgaggcttctccaagtcggccacgttggtctcgaacttctgacctcaggtgatccacccacctcagcctgccaaagtgctgggattacaggcatgagctgccacgcccggccatgtatctttttaagtacaggtggaggtctcattatgttgcacaggctggtttcaaactcctggactcaagccatctgcccatcttggcctcccaaagcactgagattaccagcgtgagccaccacactggccaacccagactttccactggtacactgtcttcattgctttgatagcaacttttaggctcccttagctttaaaaaagaatcctctaaccatatggggaaaaaaaaaaatcagcaacaactttgtacccacctgacattcggccagaatttttccaacagaacctaacaatagatatgctctctgaaaactctacccagatcgtacactccttgctgggtaggattgtttcagaggatatgaaggacaagggactgagccatgacacctgtcacttcccgtctgagcagttcctgaagaaacagcccccggggaatgaactaccccctctgcctcggggacaggcacctcctggtccacatccatccctggaattagatcggagccacagatgctatcactcctctgccgtggccccatcctcctctgtctggcttttgatgaactgaagactggggtccgggttgtaatggagacttagagttgagtgaagcattttagctttaagaagattattataattatctcaaggcactgaagggctgcttcatttgcatttcagacactaaaatcagagggcagatctttaagaggttaattttgtgagtgagtccttaataacagagggaccaagactcgattctttatgccttaggctaggtttgcagttggtagatgcaaaatatgctgataagattaaagctcctctagtgactcttaagcctcaggctcttttatttgcaaatgtcctgcaccctccatctcagagaactctctaggctccggtactctagaatcccttacagtggatttgcatggacaggaaagcgaattctcatctcttccaatcactgcaagacatggaacggatagtctggcggcacgtctggcagctgaacctcttcactgagaatctaggtaaaggccacttactgatcattataaatgcgctcatcataaagcagtccttctggatttctggcattttcttgaataaacttattgaaacaccctaaggagaactcagacatccttttcaaccctcaggagcggataagaggatgcagcttcatttgttaaattgcagttgcatgtcagttatgaataaacatggactggacttctgatgctaatgtaggaacgatatttgtacctcctggaagtaactcctatagctcgttttcttttaaaattatgcaatccacagtcaagtcctggggtacaagtctaagaggcgtcagccacacaagaggctaaagtgactttggggtagtctgcaagtatctcaacctgtcatttctccagacattcagatatagtacattttaaacacagcactgcctttttcttgaaatatttagtttcagtgttagctaagtttgtgattttttaatgcagaaaaaatgatttatttttaatttctgattcctcgtcgggctatgtatatgtaaagtccagggttatgagaaggcagaagtaaacttgctgggtagaaggcgtcatggtatcatgtgatgtggcttagattaatatgggccagaacactttctctttagacattgctaatgttattcttattcttctactattcacaataatagctaacatttactgagtgcttacagtgtgcttggaactttgctgagaactttataccaattatctgagttttacagaaacattttaaggtagatattgttaatatcccaatttgacagaaggaagaaacaggagttctgggcaggtaaggaacatgcccaagcattgctcactaataaatgactgagctgtgtgtaaacatagttctttccacgtccaaagcccatacttgtaaccactgcactgctgtttgtagatttgttcgactcctcagagcagtaagtcagtttcatcttacttgcctggcctctccattgagtattgaacttggcaggaaatagtgttgggagtgatttgtgatgtctgagataggtagatccagtacagaggaatgttgaaattagacttactagtcccatattagattcttctcagactatccacgagagacttctccatggacccaataccaaccaagcttctgtagaacattttttttttttttttttttttttgagacagagtcttgctctgtcaccaggctggagtgcagtggcgcgatctcggctcactgcaacctccgcctcccgggttcaagtgattctcctgcctcagcctcttgagtacctgggactacaggcgcacaccaccacgtccagctaattttttgtatttttactagagacagggtttcaccatgttggctgggatggtctcgatctcctgacctcgtgatccacccacctcagccacccaaagtgctggaattacaggcgtgagccaccgcacctggcctgtagaacacatttttattatgcagtccatgttcatatgtctagcctgtcagtgggttacttgttaataaaaagcagccgtttcatattagtgtctcattgaaagcagtgcctgttttccattcattctaccttggatttgttttcttcctcaatactgaattcttagaaaatgatatgtatgttgaaaaatacttgagaatacctgagaacggttctctgttgcatttattgctgtatgtgaacctgtctatcaagaatcccaggtgttttgtgatttccgtgtttgtgaaatacattaactctccttatggttggagaaatcaaaacagtgcaggtaaatggtgttttgaaatatctgtaatagtagcgaataagtcagagcctcacagtgcttcattttttaatggaaaatttgaacacatacccacctcttcagtactgaagaattttttcctgtttgattttgttgctgagattggagtttgtcccatgagaaatcactgaacagatttaattttgtttattcttttttttttaagacagcatatttgttctctaccaatatcatccaaagaatgaaatgaatttcaaccagagatgtaggacctaaaaaatttaggtcaaagcttacatataagtggctttgtcttgctggcatcagtattttcgtatttctcttctcaaaagaagataactttatatcaatatttcagaattccatgtagcccaccctactgactgcattgttgtctgttatgctgatacaaagatcttttgttttccttgcctgggatgttctgccatatctcagatggctggatggacacaggtggcctaaaattcctgtgccagattcagcatgatcctgacctaacttggcctggatcataaagtaaaccttggggaatgttcccgtagcctgagcgggaaacactggcctctgggagctccttatggaggagagaaaacgaggagctgtaaactggacaatggattaaaactctagtaaactggctggggtgcagtgtctcacgcctatcatctcagcacttcgggaggccgaggtgggtggatcaactgaggtcaggagctcgacaccagcctggccaacatagtgaaaccccatctctactaaaaatacaaaaattacccaggcgtggtggcgggtgcctgtaatcccagctactcagggggctgaggtgggagaaccacttgaacctgggaggtggaggttgcagtgagccaggatccttccactgcactctagcctgggcaacagagcagataatctcaaaagaaaaaaaaaaaatctggtaaactgaattccgggtcagatcttcagatcttacctcctgtgtaaccttggctaagttaccaaatttctcttcacctcagtttctctgactgtaaaatggagacacaagccagaaaatctttaagttcctgccaagttttaagagtttgaagcttccacgatactctgtgcccaggcccttcctgatgtctgcttttacagcgggacaagcagcaatgctgttgtactctctgcatcttggggcttgttcctctgaacccttgaagacaagggctgagccgcgtcagctctttcccaaaacacaatttaaacccttcggagtggtcagaaatgccactttgggaggcctccctgggttctctgggtgttttgttgaagcagtctcaggttctctaacgttctttttgttgaagatgatatctacaagctttataagctttcttctgatggggagagggaagaggttctcttaaatacagtgttcaactatcaaccgtcatctttagggagacccttcaataacctcagtttctctttgtgtataactagagctaataagagaatgtgggtaaattgggctaaaacaaagccaacattacagtagttcacatgatatttttaaaagaaaaacaaaggcggcacgccagactaaataaggctaccatggccaccgaagttttgcatcaatttgtgaccaaaggacatttttcaaactgacctaagccaatttggtatctgcagttatttttggtcaatatcattagcctcccatagttcaaagtaggtggggctataggttttctcctacaaaaccttgtttccaggtcatgttacaaaggaaataagtcttttatttttatttttatttttggagatggagtcttgctctgtcgcccaggctggagtgcagtggcgtgatcttggctcactgcaacctctgcctcccgggttcaagcgattctcctgcctcagcctcctgagtagctgggactacaggcgcgccccaccacatctggctaatttttatatttgtagtagagacggggtttcatcatgttggccaggatggtcttgatctcctgacctcgtcatccacctgcctcggcttcccaaagtgctgggattacaggtgtgaaccactgtgcctggacaggaaataagtcttaaaccaaattctgccatacttacaaacgtgtagcaagctgacaggaaaagtcctacaattcgttttgtaaacttgatgaaaagccacgcccctatccttttaggcaatcctacagcattttacataaagggtaccctagaggcaagtgcggttattgcactaatggcatgagccagataatcatccagttagtcaagcagagaaaagtgctcctggaatgacctgaacaatggaccaatcagttcaaatccctaatttgattaattgggcttgctggattttatacaagcaagaatgcctgctcaatatttctagccaatcactatatcttgaacataaccattttcaccaaagaaaaataatttctaactgccatgattccagttaaactctgccgttgaccagtaatagagatagccaaggcagcgtggcaacggcctttggagtgtaaccttctgatgagactctcagatgataacttggactggcctaggcactgagcaatcagaacagattctggcctcagctgatgctgtgcagaagcttcctactgagccagaattgtctcagagagctgccaaggcaaccaggtcttgagtggccaagatctgagatagaagggaactatagagagtggagaaggtgcttttctctccctgttcatctgctgagaaggcagcagaacttttggcagtataatgaggcttaaaagacaaaatttgggattcagacctgccaaggcggacaagacttaagagatcaagatcctgggaggaagagacagaaaagtgaactggatactccagtcgttgtcccctttgaagcatttgccaaatattagactgtatactgcaagagactaagcaaaaaaaccatttttagtggagttctcagtatcacagtgctaagtggaaaaaaaaaaatcacatggcggggtgcggtggcttatgcctgtaatcccagcactttgggaggccgaggtgggtggatcacctgaggtcaggagtttgagaccagccatcaccaacatggtgaaaccccgtctctactaaaaatacagaaacttagctgggcatggtggtgggagcctgtaatcccagatactcgggagactgaggcaggagaatcacttgaacctgggaggcggaggttacagtgagccaagattgtgccattgcactccaccctgggcaacaagaccaaaactctgtctcaaacaaacaaacaaacaaaaaacaatcacattcaaagcttagccaggagaaaaggcgctaggagataccccactgggatccttgaagaatcataacctaaaaatagatgtgaacctgaagtagacaagcgatacaaaatctcagtgagctcagtctgggattggtttagcttgatcactcccattcagctgcctaccagaggactgggcgaacgatcactgaagaaagatgggagtctctacctttctcataagttgtttcaatgaaaaatgatcaagcataccaagaaataagcctaaaagaaaaaaaataggcactggaaagatacccataatttactggcattatcagacataaatttcaaaatatctgtgattcatatgttcaggaagataaatgatacaataaagaatttcaccagaaaatgggaattcataaaaagaaactggggccaggcgtggtggctcacacctgtgtaatcacagcattttgggaggctgagttgggcagatgacttgatcccaggagtccaagaccagcctaggcaacacggtgaaactctgtctctataaaaaatacaaaaattagccaggcatggtggcgcacacctgtagtcccagctacttgggaggctgaggtgggaggatcacctgagcctgggaggtcaaggttgcagtgagtcaacttcacttcagcctgagtgacagagatcctgtctcacaaaagagaaaagaaaagaaaagaaataaagaaaagaaaagaaagaggaaattctggaacttaaaaaatgaaataatggatattaagaacacaacaagtggatctaatagcagattagatttagtacaagacagattcagtgaaatggaatgcaaatcagttgaaaatatccagagagatacatggagaacaaaaaggatcaaaatacagaaaagagcagaagagacatatggaacacatgtaacatataattgaaggcctggaagaggggaagagggaatgaggcagaagcaatatatttttctttttctttttagttgacacataataattgtacatatttgtaggtacatatttataggatacaaagtgatgattttggtataggtgtacaatgtgtactgatcaaatcatggtaatcagcatatctatcaactcaaacatttatcatgtctttgtgttgtggacattgaaaatcttttcttctagctttttgaaaacatacaataaatcatcattaaccatattcacctgagagtgctgcaggatgccagaactccttcctcctacatagctataatttggtctatagtttggtatccattaatgaacctctccccatccacctctccttcctacctttctcagcctctaacacctaaaattctacttcaaaatgtgatttaagaagccctggcttgccccaaccaggatatacacagagaaaaccacagctgggtacaatgtagtaaaactgttgaaaacaaaagccaaggagaaaaatgattaaagccgtgagaaaaaaattcattatttttaaaggagcaacactaagacagtaactcatttctcaacagaaacaatggatgccaagagacaatggaacgtcatattcatgggttgaaagaatgtaaccgtcaacctaaaagtttacaaacttaataaagatattcgtcaaacattgaagtgaaataaagacatttcaggacaaaaattgaaagaatccatcatcagtagaccaacactaaaagaaatactaaaaggaagtatacggatagaaagaaaatgatcccagaaatgcaggaaggaatgaaagctgacagaaagggtcaacatgtggttaagttcaaatgtattaagaatatgagatgtattgatggctggatagagggatggataaatatgtgataaagtaaatgtagaaaaaattttcacatgcagaaatgtggaaaaattaaagaatctggatgaggggcatatgggccattctatttttgtaaaatgttcagaaaataaatatagggcaaatataaatgaacattgaccatataaaagaacaaaaatggggttttgtgggcactaaaatatatgtagcattaaatgcatgacaaaaacaatacaaaaagtgaaagggggtaaagggagttaaagtgtaataaaatcataacatctggaagtattaaaactcagaattttaccagactataataggtcaaggacacataatgtaatctgtagagcaactagtaaaataatgcataaaagggaaaatagaatgaaaaatacttgattaatctaaaataattcaagaaagaagaggaaagagaacataaactaggtggactaatagaaaacaactgtaagatggtagctataaactcaagtatatccgtaattgagttacatgaaaattgactaaatactctaattaaaagataattattgttagactgtattttaaagacaacaaaatctaattaaatactgcttataagagacgcttcataaatgtaaggacaaaaagaagttgaagataaaagaatgaaaaaaagatataccttgtaaatgccaaccaatataagctggcatagttctaatataagagaaaatagacttttcaagaatcatcatgaagtcaggagttcaagaccagcctgaccaacatggagaaaccccatctctactaaaaatacaaaattagctgggtgtggtggcgcatgtctgtaatcgcaactactcgggaggttgaggcaggagaattgcttgaaccctgggggtggaggttgctgagagccgagattgcaccattgcactccagcctgggcaacaagggtgaaactccatctcaaaaaaaaaaaaaaagataagtatctttaatttatcattaatgttaaatagccaaaaatatacagaattaaaagaagaaaccagtctgtaatcatagaaacaacatgtctctctcaaaaactgatagaacaggcagacaaaaaatcagttaggagagaagatctgaatctctcaacaatgacacaattcatttccaagtacaactgggacattaaccaaaattgaccatatgttggctcataaagcaattcttgacaaatttcaaaggactaaattcattcagagtactttttttttgaccagagagaaattaagctgtaaatcaatgaccataaaaatagaaaatcaccaaatgtttagaaattaagcattctacttgtaaataaccaacaggttaaagaagaaatttcagtggatttcagacaatagtttgaaatgaaatgatgaaaattttacacgtcaagcgctaactaaccactcacccctgaagtgtgtattcctaaggtacttcaaatattaaataactactcctataatgtaaattaataactaacccacacattattatactatgtatactgaaggactgttatttatttatttattttaagacagaatcttgccctgttgcccaggctggagtgcaatggcgtgatctcagctcactgcaacctccgcctcctgggttcaagtgattctcctgcctcagcctcctgagtagctgggattacaggcatgtgccaccacacccagctaatttttatatctttagtagagacagggtttcaccttgttggccaggctggtctcaaactcctgacctcgtgatctgcctgccttggcctcccaaagtgctgagatttattctatcatattatcattcatctcaaactccatatgtaacttgcagttgatttttcaacattcaaacatcatttattattatccatcaaattgccatcttgttccatttccctgcatatctcctttctgtgtagaagtcttccttctgggagcaggacgaggtaagtgagatgagagcctgggctgtcacactttatattctaatatttttaacccaatttgctttagtgtggtcagagaagctggaaattgaatcagagacctcaggggcaactcaggtgataagtcagcctggatgtgaagtttatcagtcttggctccgtgtgtttaattagaagctagtggaatgttatcattgactccgccagcaaacatcttcactggagaggcagctgggttaaggaagaacatgctgaaaatagagcttatgaacatagctgaaaactgtttatccacagcaaccagcagaagtgaggggcgggagagagcccagcagttggcaatcagagcgtgcatataagcaaagggatcatttcttccaagctgtgtcagagggcactcaatcatgtatactgagctttcttcctgaaaagatagttcaaatctgtgtggattgtcaagttttcttcctctccataatatggtcattaatatttcacttcttttagccaggaactttcaataattcaacatctgctcttccaggctgcctgcaagaaaggccagtttccacccactgccctcctgggtttgtccttccaggtacagaatctgagaggtactggggaaaagaggaggcaacgaggctagtctctcactcctctctcttccctacctgtgtttcttggacgggttcacattcttcttgcatcagatagtaaatgcagtcaaggaactggtgaggaaaatgggaagtttttttgtgcatgtgttagatgggaagaggaaaattggcaagtgttctttaagaaaagcagacacagttacattcatgaggcaaccggttgccagactagtgtgactcctgaaggaacaacttggattgcctttttttttaaaatcagtttttatctagaccaaatctcttttatttcagtgatgtcaagcagctcatgttaccttcgcccaaagagaaagatgtatgggagcttcaaactcaggacaattctcaatgtccttagcgttgactcatattaaaaatgttaagagaacactagaataatagtgatgtgtgtgtgtgtgtgtctgtgtgtgtttgtggtttcctttcctggaaaccctttctaggattaacctaggttaatccaacataatgatagtctgaagaggttgaataaatcagcccagatacgcaggtgatttagccaaggctacatggtgagtctaggggcaaagccgaataagggtggagtccctaattcatagctaacctgcactgccatagtctatcggaagtgaggtagagattattatctgattttattattccgggacacgtaaacttggctgaggacacacagctcggaaccctagcccatagataaatagacaactttatagagtataatttgagtaagccaaaaagtttccacttacatatattctagacctccactttaaagtaatttgagggggacagagaggcaaagtgagcagcatttcttcagaaatcacgttgtctggaaatagctcagtagtgcgcatggcactccgttagccaattgctgtcctgggcctggagggccatagagctggacagaggccttgttttgtttggttcggtttgtgcttgtggtattcaggctggtaggtctgatggctggtaaagtgctaaagcaatcatgggtgcgaggtacacagtggggaatgtatcaaacggtcactttcctaagggagacattctcccccttctaggaatttgctgagggttgggctgagtggaagcgtttccttcctgcctgttctctgacttccaatgcgcactttgttttaggctggatagctacacatcatcaatgagattgcagacagtccctgtgcttgctaagaacggtggaaggttttaggactactgtgtcttacatattcattgtctaagcccccaagtgtacagcattcaaagctattccttccagctctgaaatttctttgggtgaaagctgtcgactttccttagaggaaaaagaaagccatttcatcagggcactgacctcattcctgtaagcttgactggctgagccctgggagtgacacctgtcccagtctttggctttagcaagtgattgatttgaagaaatggtattggtcatttaacccacaaactgattctgaaataagactcatttgtaataaatacatctcacatttgaggactgaattcttcaacacacattccaagttttgtcagttagaaaaaatacagtactttgtaaagtataaaatccataactctatataacccaaacaataggttgaaaactgggtttgttgtaagtaacgtattaataacacctggtgtaatacctgttaacatgctcggtgcctgaagcaaattggcaagcgtttcatctccttttgccaataacttgtcagaaactgactgagggttccttccaaactctcagaagaacatccaaggccaggcagcttatgtagctcttgaacttcaccagggcgagggctgggccccggccaactagagaagccacagctgaatcagaggaggaattccgaagagctgggcaggggcctcctgatggcgagatgctgaatgggataagaatgtgatgaattaattgatttgtatcttacgcaagagctgcagtgaggatggtgaaattcatttccttccataggtcctgcccctttctttgtaagtcagtcagcagcattgccagagctgcctaaaatgccacctccatcccctgacaatcaaagaggaatcttttcatgcaggctgagttctaatgacgaactcattaaaatcaagaccacttactatgcgtatgtgatgtgttataagcactttcagatgcatgattttaaacattctggccatcctgtgaggtcagtaccatattatccccatttcgtggacagaacagtcgtttagagaacttcagtaatttactcgaggcaatctggtgtgaaaagtttgagagaggacactgcaaccaggccacctgggtccagatcttggccttgccacttacgagctatgtgaccttgagaaaaggtcttaacttctttgtgtttcaatgtccttatctgtagaataaggataatagtgttgcggatgtcacagagtcgtaatgagggttaaataagttgatatatagacagctccgagaacctggcctggcatatggtaaggactagctacttatttgtggtggtgatttgtttttactctgtgagagatttgaacccagtttagtttgatgctagggtcagagttctttgtcatctgttcttaagaagccagtggaataaatatcttctttctcctacatttacaaagagatgataatcctgctttagaagagttatcatgcctgcagaggtatcatagagattagtttttatccgcagagcactttttaattggaggataattgctacactggactagtgtggtagtaggaattcatatcaaaattagactttgtgactgaaagtgtaaacaaatgcattcttgctaagactagccacatatttagaggcatatagcagtctgaaataattctattcctttgtcaacacacagacggaggaccgttgggccttttgctaaatttggctctgctgcacttccgtctttagaactaggcaattgcttcatcatgcctacattgtgctaccctgatattttggtacctactgcactgccgcacattcatgggacgccagctgtaccatctatataataatctgagaacttggccattcaccatccaaagttttcatacaaaccaatgaaggcggcgtgcacttcagatgagcaaacaccagacctgtagtataggtggacagataactagattttgcttttctgataaaaaaggaatcttgtctgttgttttagaactactttatatggacagtgagtgcagcatgatttcttccaactggagatttaatggagacctggatcaaacattacatactttgttacatctttttgagaatgagttggagtgaggggatgttatgttgaaaaagaagaggcaggctgggaagggtggctcacacctgtaatcccagcactttgggaggccgaggtgggcagatcatgaggtcaagagtttgagaccagcctaaccaacatggtgaaaccctgtctctactaaaaatacaaaaattagctgggtgtattggcgcacgcctgtaatcccagctactcgggaggctgaggcaggagaattgcttgaacccaggagggggaggttgcagtgagccgagatcctgccactgcactccaacctggcaacagagcgagcaagattctgtctcaaaaaaaaaaaaaaaaaaaaagaagaagaagaggcaacacttgtcttggcaaaccatgactagtttagactgcaagctcaatgaagatcaaaactaggttggtcttgttttgtttcaggcactctctgtatgtatttgttgaatgaatgaatgaaaataatagttatgattataatattatctaagtatgaagaacatgcctctggatcagtaaagacacataaaatggtaggagggttaaagaacatcagtgggtaccaactgttttgtcatgacagggggatatctctgaaaaatttctgtattaattggaaaagaagcttatggtgaacttttttttttttttttcgagatggagtttcgctcttgttgcccaggctggagtgcaatggcgcgatctcagctcatcgcaatctctgcctctcgggttcaagtgattctccttcctcagcctcccgagtagctgggattacagacatgcgccaccaccccggctaattttgtatttttagtagagacggggtttctccatgttggtcaggctggtcttgaactcccgacctcaggtgatctgcccgcctcggcctcccaaagtgctgggattacagcgtgagccaccgcacccggccatggtgaactctttttaaatgacacataaaatttcctgatttgtcttttaaaagttacatctagattttcatgtatcatttttcttataaggatagctaattaatatatagattttatgtatggattttcatatttcatgtatataacatgaattaaactgttatttgtatgaagtgccaagctccttttgggtagtacctaccaccctgtatataccacatgccaaatgagtttttaagatattggcatgtcccaaattcaccatttacattcttgaaagtacttcctttgttccatacagatctaactaaatattagaggtatctgaccttttattttttgaaaaaatgtttgatgttctgactatttgcaacaaaagagctctgttctcaaatgccctgtatggagagaatttctcggttcttttgagagggataaaaaacctctcttaagtctgtgagactaaagataaagggcatcccagcaccatgtatctgagggataatgactgtccgtatcggagagctgggcggtgatgggtgtgttggaagcaccggctggaccaatggacttggagctagaacttggttttgctctcggcgttgccgcagggtggctgtcttgccttatgcaggttttgattctcttctgtaaggatctggtagctattccaaagccaacccatctgtgctatgggatttgatgccacatgactccagctaccctggtaggcctttcccaggcgttggtcagagatatgatccaaaggctgtctgtagaagattgttctctcctgagtgttctgatgcagccagcacaagggtttcctaaggaaaggaacctggtcctgcttcggtcgttttcgtatcccctaggggctgctgaataaagtactagttcccaagctttctgtcatatcttctctgcacacttctggagtagagtgggtgagggcaaggccaggaggtcagtgccacagcgtgggaagagaggaggccctgggccctattctctctggggagctttacatcacccattgctctctccatctccccagggcccagatggctccattctagagcttctcctccaaccccttcccaccttccatcccaaacactttcctctctccttcttggtctctctctctctctttctctgcccttccttccttccctccttccctccctccctcccttcctctctttctccctccctccttccctccttccctccttccctccctcccttcatgttttcctttcttccttctttctttttctttttttttgatacagggtcttgctctgttacccaggctgaagtgccacccctgtgatgcctagtggtacaaacactgctcactgcagtcttgacctcctgggctcaagcaatcttcctgcttcagtagctgggactgcaggtccacaccaccactcccagctagttttttaatttttttgtgcagatagtgtctcactatgttgcccaggctggtctcgaactccttgcctcaagagtcctcccatcttggcctcctgaagtgctgggattacaggtgtgagccactgtgcccagcctctctgctctttcccttccttctcctcttagttaaaattgtagccgtggtcagaggtggctctgtctcctcgtagaaagcagggagcaagactacaaaagaaatggtaaaattttaacgaattttaaatgaataaatccctaatttcctatggaatgacaaactaaatgatggtttgtagttggaaaattaagcaataaaatacttttttattttttgagagagagtctcgctctgtcacccaggctggagtgcaatggcacactcttggctcactgcaacctccgcctcccgggttcaagcgattctcctggctcagcctcccaagtagttgggattacaggcacgtgccaccatgcctggctaatttttgtattttagtagagacggggtttcaccatgttggccaggctgttctcgaactcatgacctcaagtgatccgcctgccttggcctccaaaagtgctgggattacagacatgagccactgcgcctcgcctatttttttttttttaataagtctataataggtatacacagggcctgactattccagatagtgtcagctgtgtagttttcttattagcagacttgggatctatatttatagacaattgaagttttaaagatgtaaagaatttatttattcattcatttattcttttgagagggagtcttgctctgtcgcccaggctggagtgctgtggcacaatcttggctcattgcaacctctacttcccaggttcagtgattctcctgcctcagcctcccaagtagctgggtttacaggtgcctgcaaccacgccctgctgatttttgtatttgtagtagagacggggtttcaccgtgttggccaggctggtcttgaactcctgacctcaggtgatccagccacctcagcctcccaaagttctgggattataggtatgagccactgcggctcatacataaagcattatatacaattgtcattatatactgtaatgtaccttcattccttctgtctgaacaatgtggattttagaaataattaccaaatataaacactactaaaatgtgtagatttggtggtgcagcacatcaaggagcacaaattttacaaatttctttttaaccatctctgcgttgtattttcagaatacggatgattcattttaatcctggtgtctttaaatgattaaggattttcatacatgaggtatttcccacagggaaattctaaggtaatttgggtatgattcgtttagagtttttcattatttacaacaatttagtaaccattagactttcttccttgcatgtgaatacatacatatatttttacatcaagtatttccatcgaattttagctgcttatattttctttttaaccattacttggaatggtattttcctataagcggggaataaagaaactacttctgtctctcgggtatattaacagggacagtggggcctaatttcttatgtcccctcagttagcctttgtcacagacactcctgtgttttggggtcaggagggaagagatcattgcagactacagtcatggaatttgattcatttaactgaaaactttttattttactttacccatcttaagtcctcctgatagccctataaagtaataaattgtccaaaccccttcaggaaactattcttaattccatcatcatttatagttgcctatctgcccaataaaccagaatttagccttaaagccatcgctctcttaatctgtattatgatcttgtctttatatatgagttttgtttttcaaattagtggatggccttaggtaccattttgttattctgcttgtttgtgtcttctgaagacagtcacagcatcatagaatactacagattggaggggtctatgggatcatcagaaccagtgcttttcaaaaaaattttaactgcaaactccccatttgaagtgaatttttgtttgtttgttttgtgacaaagtttcactcttgttgcccaggctggagtgcagtggcacaatctcagcccactgcaacctccacctcctgggttcaagcaattctcctgcctcagcctcccaagtagctgggattacaaccatgtaattacactcggctaaatttttttgtatttattagagattggctttcaccatgttgaccaggctggtcttgaactcctgagctcaggtgatccacccacgtcggcctcccaaggtgctgggattacaggcgtgagccacggtgcccagcctgaagtgaaatcttataagaccctcagtattggtccagggagggtagacttcctcatacctcccaggaggcccgagggctccattgcctctaatttcctctagatgagagaactgacacctctagagataaaattagctgcccaacattttggtgagggaggaagagtccatttttgttgcttagaagcttcgaaatcagcagaggtcagtgtatgtggagattgctggtaataagtctggaaacagagcagaaggttgcaggttggaacctggcttccctggaagccaacactcaggtggagctgggcatgcaggatgtttactggaaatccacacccgtagaaaccaggaggatgcaggattgtaccaaggaaaaagtcaaactgccacacaggccaacaaagccttggccagccccacagggaagcgctggagcataaatggcccatcctcgtgtcctgtgttggacttgatggctgggcctttataccctcactgctatcagtctttggatgtgaaccaccttgggaagggcaggcccttggccttctgcagcattctgtggctttcttcagtggaagcaaatcctgaagaagctgtcagctggaagccaattgcccacagctggggcaacaagtcctcccttgaagcaagatctagaaggcacatctccatgtcccctccacatggccccaggattgctggtgaacatgagagacagtggagaggagagtcccgggaggcagccttcccagccaggccaccccaaacttctggttagggattcccagcttcacagcactacgtaagctgcttgccaacagatgttttgacaacatctgttgtcaaaggttgacaacaacctttggtccttgcgatggctttctcctgtgtttcaagatggattcctattggcatctttcatttccacctctgtttcaccaagtttagtgaccattttcatacattggggcttaatgtggtgcagtggaaagtgtagcagattgaatgtggaagatcgggttccagatctcgttcaggaagttagtagctgtgtgaccaagagcaagtcgttcagcttttctgagccatgattcctcaggtgtacacaccaagtgatgaaacactttaaaaactaagaaaacagtgtttgaaatgcccctcaagtgctggtgtttccccaaggatgttctagacccttcaccattccattcattcattcattcattcatctattcgatgattagtgtgatccctaacttttttattgttgttgttgagacggagtctcgctctgtcgcccaggctggagtgcagtggcgcgatctcggctcactgcaagctccgcctcctgggttcacaccattctcctgcctcagcctcccaagtagctgtgactactggcgcccgccaccacgcccggctaattttttgtatttctagtagagatggggtttcaccgtgttagccaggatggtctcgatctccttacctcgtgatcctcccgcctcaacctccccaagtgctgtgtgatccttaacttttaatctacagttcctcttttttttttaagccaagtagatgggtgattttgttttctgctaattattttggtatctttcattccacctctgtttcaccaaatttagtgaccgttttcatacattggggctaaatgtggtggtcgttctccagaagagtgagtgtaagttcgctcttactttgagcagcttatctctgtttaggcgatttctttgtcaccattaatggaagtgtgacacctttctgagtcccaaatgtatcggtttatcaaaaaccacatctgcaatgctgcaccttgtactgagttcacctcagtctggtactttctttgccttttgtcttgtttgcctccttgttagattagctccttaaaactttttcttttcattttccactaagtcataactctctagactaaatcctattaaagaaacatttaaagtgtttctttactgtgaagtgtatcatgcatgaaaatagtgtgtgaaatggaggtagatgttcagtttaaagaccaatagtagagcaaacgtctatataccaactcctcaggttaagaaatcctcttgtgatatatttatgcacgtggagtagctactttttccagaatttggggacatgtaatgatgactgagagatcatatagtctacataaaacagctcatcatcctagaatgagaaagagagaaaccagccaataaagaagggcagtgtgtataggtacttacaatgagaaatacaaacaagatgggattggagccgttctctatgtctgggagagttagaaaagtttccaagaggatgagacttttgaaaagtttccaagaggatgagactttttaagggatggtttgcctgaggaagatgagcgttccaggtaaagggaacagcatagcacgtgtagtgattcttctccctcctcattcccctctcaccattctgaccattcaccttcagtttcgtttccactctcctatcctccataaatgttggtgttcccataggtgttgcattaggatctcttctcacgtcattcaattttcatccattcacttgctcaatgtcaatgaagcaatgggtctccagaaactcctgcctgcagaactatctgtggagcttggtaaaatgcagatggtcccaccagctcaatcagaatctttggggtagggtccaggtatctttagtgcagatgactgggactccacatggagaaacacaggtgaacagggagggttggagagaccactcaggaatcagtcacaggtgaccttgtgcttcctgctaccatggctgcccctcccagcctgcctcacctgtgcctttctcccttctcccttcctgccttcagctcctctgttgcttcttcttccttaaacatcttcaccggttcctgtgctattacagagccccgtctgtgggtctcatgtctctgctccatgccacgccctcccttgggcatcatctgggctttggctgggtctgtggagggtcctgggctgcagtgccatgaacagtggagtggggcatgcgaagttgacagtcacactgaaagctcctgcctcgcctctctaccttcttctcttttgggggtttctttcctgaggcagggaaaaagaaacaggaacccagaccaaactgaggaaaacacgatcagagatgagatggggtcagaggcaaagggctgtttgttgggtttgcactttcattactgagagcattggaatagttttaaggcgtgcaaactgtgagactagacaatttcacttagaaaatgaaacgtgcatgcagatgttattctcatggggatatatatctgcatctgtttgtctacaagtgttcccttgcagagtcacagacatatacaaaacctgggttccatcagctttgtctgcacatacgtggctaaatgtgtacagggatgtacaattaaagattttaaacacttgattttgacagtatattttgcagctgctgtgccaagaaccctaagctactgtgggttaattggagttgtagcaagtatttctttctcggctgtctcttttagcagagcttctctctctctctctctctctctctctctctctctctcttcccctctctccctgtttcacccctccctgcctgcctgcctctgcccctccctccctccctccctctctctctctgagatagcagacaccagagtgaaactggtgcagcttcctttgagaagcgtgcttgcatgtgcggattggcaggattgtgtgagctcctctcccatccatgcactgttcttggagggaaatgcaatgttggagcaggggctgagctgcactgggaaggtggctgggagctcagtgaggccaggatcatggtttagccaaaggctggaatcacaagaatgtttcaccagggtctgctctgagagttctcagacccccatggattttagaattttccagcctttcctccttcaccttcgcacaattttactttctcctgagatggccccagatctgcaagagacatttgagagaagctatttattagcagacgtgaagaaatggattctgcacttgattatttagccatgacttatcaatgatgatggattggaaagcagtgtaagtaacgcagttatatatgttgctggagttaggtggtctgttttcttgctattttttttttactttaactttttcagtttccttttgagaaaagtaaaaataaaatgcataaaccatttcaaagaagttaggagggtccaggttgtgcaagctttcttcttgttcaatggacttgcagaatacctagttctatcagaagagacacacaaactaccgacatagaagctacaaacatcctccggaggatgggaatgaaatgggtaataaatgaagaaggtttctgaactgacagtcattgctataatcaggcttattcagagttgctaaaatatttgacattggctcatattagaatcaaagaactaaaatgtattctctttacaggatcataaaaatgaagttagcctgtggctttcagagcaggttctttctggctgcgtaaatgtgagggtttttgtttgtttgtttgtttgtttggttttgttttttaactaatgtcaaatgttgactatgtttcctgtccatttcaacttttcttgaggtcggacatctccctattctagagtacaatgtctggtcactcttgggttgcaggccactgtctagtggaaagctagtcattgctagtttataccagtcagagacttttccatctttctgtgtgagggcttcgtttaagcacttcaattcctaagtattcagggaggaaaaacaagtcacttgaagaccaaaatcagtttatttcacaagagaaaggaacggctatttaaaagatgaaaaattgaaatttaaaaatatgatctgccttttcttcaaaatctgaagtgaggttaattttgtgtaggaagagtaacataagctttcttgattaaaaagcagtatttagaggaggcttttaagatcataaatcacttaggtaaggtcatcaaaagagatggctgatattttttatggtcatttgcaactttttaaaaaaagtccatacggtaatgttaatgcagctatttctggcttcttaaaacttgcatagatttggaagtgggatttctaacaataagagtcgtgagtttttctgagctatcattgcctttctctgtctatcacattcatacctcaggcagagctactgtccctcccacctgtccaccctgcctgtttcccagcccccatccttctctctgagtcttggaacatcatgaaagactcttctgcagatttccttttaacataccctgcccagccttggacagagggagtactgtgaagcaacatgcagggctgccaattttggaaatgaatgagcttagttgattcctgaatattaaatcagttctgtgagcagtagaatgagatcatatcttacaaacctgacccaaagtgttcctaacaactttattaattggggtttaacatcatcaagggctgtagcactgggcacccgaggggatcagcctaaacccaaatgaaatccccaaactccactcggattcctgctggccaaatgcacctagggccacgccttctaaaatatgtcctttgttatcaagggaaatctgagacagaaaacacatgttggcagcatcatgtgagcgcctctctgcacataaagtggttgtatcacaaggggaaagctttcgatcttgtgccgttttgttttggtttcttgtttatgtggactctgttagactcctgcatctggaagaggcttgaagcagagtggaaaacctagagcaaaaatcatgccggggaaaggaaaatcattaaaaaacaatgactaaaaacagaataattttcttacccaaattccagttctcatccttgttttgggttccctgttaaagcagataccagttatagccttcctgggttaggggagacagacagtctttcatcatgcccctggattttgagcaaaggagaaagcttgctccagaaatagaaaagaaaaggcaaaaagaaaccatctttcgagtttctgctcactaacagaggaagcaaccccaccctcctccacaccctcctccacccccacagcttgtgcctctcaactgcccctggtggacagctccaacctgcacccccccccaaccccgccgccccctctagaatctcacgtgttttcgtggaggaccgagagtgctttttagcagtgaatgagcaaagagaccagatatgctgatacctgcacatggtctttgagagaggcagctgattgacatcgggaaaactgctgagcaattaaaaaaaaatactagagtcaaggtgaaagaaaggagagaaagagacagcgagagagacaggtgggttgtctctaaagtttcaagcaaagttctgtgaagcacctagcaggtcaaaactgataagggcagatggtgaagaaaagtcttaaactgatcagtgccttacacatggaacgaagctttcatttcggcccgatgttctgccagaaagctttgcttgagatccaccgccagtgttcttgctttgctcaacgatcccactatgctggtatgttctctctctggacagccgtctttctaacaacgggtgctgttctgaaaagctgggagcccaagaaatgttgtaaaaaccaagcgtggccttcagctgttggaccctgaggaacagcacctgcattagggccttgctcacgtttcttactagacaggttgccagctctcatttttgccctttgtctgagctaattggccttagtgttacatcggcccacatttttctccctgtaaactccattcctccctcatttcatctacactgcagagaactctcaagctcctggtgagttttgctgcaaagcctgtggcacgctgaaagaatgcaccccttccgaacctcatcttcccacttcttccactggagacactgcgggggagaaacatgtaaatatcgttaataacaatgcatcgcgtccttgaaaattgctgctaagagagtagattgtaagtgttctcaccataaaaaagtatgtaagataatacatatgttaattagctcagtctagctattccacaatgtgtacatattttaaaacaatgtgttgtacatgataaatatatacaacttccacttgtcagttaaaaaataaaaaataagtccaggcgcagtggctcacacctgtaatcccagcactttgggagtccgaggcgggcggatcacttgaggtcaggagttcaagactggcctagccaacatggcaaaaccccgtctctactaaaaatacaaaaatgttagccaggcatggtggcgggcgtctgtagtcccagctactcaggaggctgaggcaggagaatcgcttgaacccagaaggaagaagttgcagtgagccaagatcctccactgcattccagcctgggcgacagagtaagtgagactccatctcaaaaataataataataataataaaataaaaaatagacatttatataatgaaggtttttaaaaaagaaaattaaaataaatttggagaatgacctgtgaaaaatgcctctgcaagttttcctgaccagaggaaggacttggcttctctcctagacattttttctcgtatcttcctctaggagtcagtggaagagtggcgattaggtaacatctgaatgtagtagaacccagagctgttacctccatttgagctactgctggtcattgcttgacttctattctctccatcagtaaaatgcacgcgaagcttacctcattaggtttttcgagaattaaatgagataatgcatggtgcttagcttagcgtctggccatagccttgatgtcaatactgtcctcatgttctcctgtcagcggtaggtctgtctctcagacactttccaacagaggacccagatccttaatgacaggggacctgggaagacagggaggcaatgtcacagaatggaaagcgtgctcgagtagaagtcaagacctgggtgtttgagtcccagctctgtgcataaccatttgagtgatcttaagaaaatgatcaccccctcttccatgctacagccctagatgggttactccttactccaccactctcctcaccttgactcgtgccggtccctcagcacgacgggtcctcctcctggctggctcctttcttctctccttctatgagactcccctgatcccctgagcccgagggtcagggcttctcctctgccatcctatggcacctacatctctccacgcttaccgtgcagccatcactgtctgcctttcccactcgactgtcatctctgtcttaaagctctgccttcggtgtcaagaccgggcagcactcaatgaatgtttcccgaacggatacgtaaatgacagaaggaatggatgaagagtccctgccctgcctcaggtcttgagtgaagatgaaatgaaataatgtgtgtggaaggcttggatgagtagagtgctgtgcagttgccttcagttttaagttagtatgaggacaaagcattttttataccaatattttagttggtttctcagatactgagattcacacattttagtgaaacaaaacaatattctcttttataccatccttgcagtgtgggcccattatttgttgtagaagcaggccaggctttatgtgggctagaacctctgatggttgaaactgtgagcaacaaaacttttcattgcagaatgacaggtaagattctgaaagccagtggcatgggagggctcgctctgtaactcggcttgtcccagggtatgaatgagggagttcagatccctgcctgtgagggtggagaagggaaaatggtttctaaaagcagaggaggaaagagaaagaatcatcatggaggcagcatggtcagggaaggggcagagggtgttgcatctgacaaagctgggtttggacgatagcctcatacttgggtttctgttgtatctcatgagtcctctccctggaggagtatttggattctattctgcttctcccctgagtttgttttcacggtgggactatccaggactaaagagaatggcaccgtattgctctctctttctgaacccggacttgcaggccatatctggatttatcctttttatcagcagaatggtacatttcccatagcaatgcttgaactctggtccgtgatgaagcaagctcttccatggtgttagagtctgtttttccttcagaaaatgctatttgcagaacggcaacaacaaaacgtgtaacaggaattgtccgttcccatggccagtcctcatgtagagccacaagatggcgcagaggatgacatgaaatcatgtacgcgagcgtgatttgctactaggcagctctgtagggctgtatgtattgatatcacatgcgtctatatgaacgccccgctgcagctgcctttgctatacagtgaatacactgtgggtctattattcgcctcttcagatccagcccaggagttggtgcagactcatttttcactttcctttgaccctgggtgtctccacaaatgaaccacctgctgtgtcttggtgggggtggagatgtggggtgaagtaatgagcccgcaaggcctgtctgtgcctattggctgctctaaagggaagttgaggaatactgcaaagccacaaatctgagatgtcagctcataaatctgtaagctccttgcttaagtaatacgctccttgacggccaaaactgtcatttgcacattctcttcagctgaacacaaaagttccggttaccagactgtccctggatactggggactaaaagctggtgattggcggagtttgggggtggggagggggcgctgggctgattgccctggctgctccccacagctccacggctgctgctttcacccccacctgaccatggtcgcagtggggggctttctcttggtatttaattagtaagtgtaggcaaacatttgcattgtggcactgggataggaaaagagttgaacatgaatataaaaatggggatggggccgggtgtggtggctcacacctttaatcccagccgccaaggcgggcagatcacttgaggtcaggagttcgagaccagcctggtcaacatggcgaaaaccctacctctactaaaatacaaaaacattagccgggcgtggtgacacgtgccccagctagaggcagggaggctgaggcaggagaatcacttgaacccagaaggcggaggttgcagtgagccaagattacagcactgcactctagcctgggtgagagagtgagactctgtctcaaaaaaaaaaaaaaggaaatgggagaaatagtttccagcatttagcttttggcgacaatgactaaatcaatacaaatgttaatctctgttgcattatgcttttgaaactgtattggcagtttaggaaaaatccagtcaacagtttaatatgaaaatagagacctgtagaccaaatggagggcaggaagcagatatttgccacacaaacatttattgagcgcttgatgtattataggtgctgtgtaaagttttggagattcagaaatgaatcaaagagaggagtgaacatacaaattatcccaactataataccggtgataagccacaaggtagctctgctagcacggaacatatggaagagatgaataattctgcttcggagggaaggagtcatattagagttgggtctagaagaatgagcaggaggtggctgggaagggagggcgtttgggcagaggaattggcatgattctctgtgtatgcacaggaccatgaaagtgaatggtgtcatgtaatttttttttttttttttttttgagaatgagtctcactctatcgcgcaggccggagtgcagtggcacgatctcggctcactgcaacctccacctcctgggttcaagcaatcctctgcctcagtctcccaagtagctgggattacagacgcctgccacaacaatcggctaatttttgtatttttagtagagacgagggttcaccatcttggccaggctggtcttgaactcctgaccttgtgatccacctgcctcagcctcccaaaatgctgagattacaggcgtgagccaccgcacccagcaggtgtcatgtaattttattcatatttcctgatgactaagacaacgtatttttcagattctcaaaacaggcaatgattagtaatagatcaccttaaataggatgttataatggtgatgaagaccaatcacagctgcctggaaacagtagatcatgggtcaataatgggcccacacctgggttttgttactgagtcaacctacgctacttgttcatgttgtacctatttatcttgagctggtattagtatatccatttctaaaaatccttgcttgagaaggaaaaactattcaggagaaagaagaggagataaagtctaaacaacttgatttcacttgaaaagtcctaagtcgtcccttggaaactatctatagtaaaaagcatgggattttataccgtgttttaggcaactgaaaggcttttttacaattgtagtaaacactgactgccagcattctggtaccagttactttattaaggtaaattcccaaaactcacaatagtgggaaaaaatactgataagccttctaaaacaccaaagaagtgtagaacaacatcttggatgcttttagtcacgagtcagaacgccgcggtggttacagagcaatagcatttcagagctgggagagaccttagagatcatgtattttgtggattttcaaatctttgaagaatgatgttctgggtaaggaagctgctaagagtccatgagctagttagtgaggactgctacactcttacacactcactcccggatccctttgtgcatgatttctgtcattcaaccagtgttcataaagcccttgtaacatggaggataaatatttgaataagatactggctttaccccgcagaagcttagagctttgaaaggaggtaagacatataggtaaataatacacataggaagttattttaaaaatataatgagagttattagagttcagaagatggaaacttatttcctagtgaaatggatgactgtgtcctgtaatagaatatttactatatttagtaacagatttatacagtctcatttgttttagttaagaagtttgagtatccaacagagaaaaaaggttaggtaaaaattaagtacagtgaggccaggcacagtggctcacacctgtaatctcagcactttgggaggctgaggcaggcggatcacttgaggttagaagttcaagaccagcctggccaacatggtgaaaccccatctctactaaaaatacaaaaattagccaggtgtgatggtgggtgcctgtaattccagctattctggaggctgaggcaagagaattgctttaactcaggaggcagaggctgcagtgagtcgaggtggtaccactgcactccagcctgggtgacagagtagaaccccatctcaaaaaaaaaaaagaaaagaaaaaattaagtatagtcatgtgtcactgaatgatggggatgtgttctgagaaatgaatcattaggtgattttgttgttgtttgaacatcatggagtgtacttccacaaatctagatggtatagcctcctacacacctaggctagagggtaggactgttgctgtactgaatagtgtagccatttgtaacacaatggtaagtatttgtgtccctaaacatatctaaacacagaaaaggtacagtaaaaataagattatcttatgggaccaccagtatatatgtggttcgtccttgactgaaacgttatacggtgcatgactgtatttggtttagcccatgtttttattttgaagaaatgcagaacaagtttaaaattgaattgttgaattgttgtcattagttgatagcctaataagaacatattgttcaagtacaagaatatcattgatttaattaccctgaaaatataattttgaaaaatatctacattttttaaaaattaaattttcgtagtgtaaactaaaattaaatactcaactaactgagagagagagagagagagagagagagagagagcccttccccagctagtctggcagcaagtgatttctaaaggccagaaataggaaaaaaaaaataatcgaatcaaattgacttttggaattgtccttatgaagcacaagtctacaacctttaactcatagagaacacagtgagcatatctgctttgactggcaacttcaaaaaacccctctcccagaggcttgggaaaacacatgttggacacagactaatgataatgtggaacaattattacaatgaacacaataattgtatttgttttatgaacatgatagcctgaagaaacccataccaagaaatattttacgtgttgtcatcattaagaagtcagcaaaccttaaagacaaacacaatctattcatccatccatccatccatccatccatccacccattcatccatccatccacccattcatccatccatccatccatccatccatccatccacccacccacccatccatccatccatccatccatccatccatccatccatccatccatccattctgtaagtgtttattgagtatccactgcatagcatgcaccattcctggcagttaagaaaataaaaggcctcactctcatggaacttacatcagaaagggcaatattaatgatcagccctgaccacatgcctttccctattaatgatcagcccggaccacatgcctttcccttagggaacattgtaggatgaatgttccctgtggtctgaatgtttgtgtctccctctaaattcataagctgaaatcctaacccataagatgatgtcattgtaacattgtagggtgtattttagttggtgtggatatggaggcagaaaagcaaggatactggtgaacctggggaatgcttaagaggttggactgtgctgtacccgttaaaaagcaataaacaggctgggcgtggtggctcacgcctgtaatcccagcattttgggaggccgaggcgggcggatcacgaggtcaggagatcaagaccatcctggctaacacggtgaaaccccgtctttactaaaaatacaaaaaattagccaggtgtggtggcgagcacctgtagtcccagctactccgaaggctgaggcaggagaatggcgtgaacccgggaggcggagcttgcagtgagccgagatcgcaccactgcactccatccagcctgagtgacagagcgagactccgtcttaaaaaaaaaaaaaaagcaataaacagaatctcatgcttctatacaataaaaataaccatcttccctatagatgatgaagagtctgttaatataatctgacaggcttgttttggaaaatatttagatacttatacatccagatatattccaaaccatagccttgtaaaacctctgagctagcgcaatccttgagtataagtctacctccacctagaccaatgtttccaaaccattctgtggctgggaagactggaaggacccccaggctgaccctgttgggaagacatgcaacaaggcttacttcttcagtggtgtcagtgattttgagccagttctgaccatccactcatccgtctgtatttgtgtagtgctcactatagacaaggcaattttggggaatgcagttgtaggaaagatagacatggctcctgaccttatgaaatgttcagtcttgtgaggaagacacaaataattacagcccattgtaagaagcggtaaggtgcttttgtacccttttggtccatttttctttttttttgttttgagatggagtcttgctctgtcacccaggctggatggagtgcagtggtgcgatctcggctcactgcaagctctgcctcccgtgttcacgccattctcctgcctcagcctcccaagtagctgggactacaggcacccgccaccatgcccggctaattttttgtatttttagtagagacggggtttcaccgtgttagccaggatggtctcgatctcctgacctcatgatctgcccgccttggcctcccaaagtgctgggattacaggtgtgagccaccgcgcccggcctggtccatttttcatcttgaccatggaccacgctggtagatgcctgggggcatgagggacatagcaatcaggctctgtcagcctttgtgaccagcacaacttatttccagtgcattaaagaaaatgatactgcctatgcccaatttagatgtgggccagctgtgttagttagcttaacacagcattttgttttgcatatgtattgattttgcgcacatgctctctaagtgcctcagaacactgcctacagcatcctggtgaggttgacaatcagttgtcctgtccctgttcatctggcatggggacacactgtcagaggaggaactaccaagtaagtaattgcctccagcacacaaaaactgcagacacatggttgacataagaatctagtttcagctggtggttttcagggcaaagcaactgcactaacaggagatttccctgacagctgatttaaggctgtggaagaccccagtttatcagctcaaattgagaatgtccttttttgactagaaacgagaccctcccagccaactgcacaaccaaaacttatattcaggatgtccaggacctgaaactgacatgggagtcaatattctacagccagttgtggtgtcgacagggtctgggggaaatcttcagagctgacttgtgatgtagcagggcttacagcaaaggcatccctttcaccttgctctttaggattcatattctaagaagctgctaagaaaaaatgtctaaacggagacacttaggatatagttttcatattaatgttttattttaacaataatgggagcaaacacctaccaggtgtttactctgcgtcaggaactgttctgataatcttatttgaactttgcaacaattccatgaggctagctactcttaccatcctgttttacagctggggaaactgtggcacaggaaagttaaggaacttgaccatggccacagagctctgagtgtcagaaagaagatttgaaaccacacagttggcttcgcatcctgtacgcttgactatttctcttttctgcctctcttgggagaactctgaaatactaaagtactatattactaaataaatgcttgctaaagcatttatttggtcccatattctcaatttacacaattcttttctccaatcacatttcattttagactttatgagccctgttgaagtcatcagcttaaaagtgcccttgagcaattctctactctagattgagttaaacagagtatctgtagataatctagaatcacagacaatacctgtcttagttcctttgggtcgttataacaaaaataccatagtctaaatttataaacaacggaagtttattttgtacagttctagaggccgagaagttaaagatcaagagaccatcaggttcagtgtctggtaagggcccactctggttcacagatggtgccttctcgctgtgtcttcacatggcagaaggggcaaacaagctccctgggctccttttttaagggcactaatcccattcaccagggctccaccctcatgacctaatcaccttctaaatgccccatctccaaataccatcatcttgtgggttaggatttcaacttatgaatttaaagagggacataaacattcagaccacagcaacatctaattttgagccacctaactttgaaagaacaaggattgattaatccaatgtcagcatacagtataccattagatgtgagcccctcttggcaaacttgataaaagtgtgagaaaaaaattacctagaagactaataaatacagaatagtcacatataatttctgtttaaagatttataccttaccaatttccccaaaatgatttaacacaactcattaaatatttgtaaaataatttaaatcttaaaatatatattgggaaccagttaggaggagagagaaaaagacaccggttcctagaccagcttggttattgtacttggacatttcttaggctctgaattttatggacgctaaggcaaatggatcacaaaggagtaaaagataggggaagggaacaaaagcatttagtgtgctcccactgtgtgcagatcattctgttggccactttcccataccttacgccctttattctcacaacagacccttgaggtagttaccgttattttcatccacatcaaagtatgtggcagaggcaggatttgaaccaagcctatttgactccaaagcctgtatgtatttttttactaggtttaggttttattattcttacccaataaagtgacatatgatttgtctggagatacctagtcttcctttgaggattttttaaaaaatggatccctatgtagagaacattgggtaaaatcatagtaacctatgaaaagtaggtattcaatcaatgtttatggaataacatgagtaaataaatgcatggataataagatgaaggatatcttctttaattttataagctaagtaactgttttttgtaaatgcttctatgttaactattaacctctataaaaaacaaagccatatcttagcttcataattcagtctaaggcagttaggtaaatacttaacaatttaatattttatgtttttttctttcatagtttaatttctcaaaagaatagccgaggccccccttatctttacttcttccacccctatttacttctcaacccactgaaatgtgctccgtgtttcctctgattctgttcaaggtcaataatgaactcattaattctaatccaagggacactttgcattctctgtcttttttggtctctcaggggcatttaacattcttagccacttgttccgtcttcctctttacctctctggctgctcctttgtaatcttctcttttatattcactcatgaagtattgaggattttcatggatctgtcacgggttgtgttctgcttgccttctactctgcacctccctgggtcatctcatccactctcataactccagctgccagcttcatgcagaagactctcaaatctgaaaactgggatcaactattttttatatccaaatactctaaatgaagatctaagccaagactgtctatcttgaaagtaagttatttctgtctatggaggcaaaggctcacgtaggaagtgaagaatcttatatatttctaagccatttcttggcagtcagtcacgtattaggagtcagttctgtgtgtttttaaatacagcattgaacgactcagtgtttgttgttattagtgatttgttggacaggatagagagaaagcacagttatttaaagataaagtgtttgtagcccttctcaattgaatagcatacatacagataagatgtctgtgaaattttaatagaaatcaatgtgaaataagattcaatttataaaatctcaaattacaggcaacttgtcaaagcctagctgttgtgtaaacgtgggaattcacacaaggaaaagatgattgattggttgattgattatataacatgagttacattctatccaattgcacctgaatatattcacagacgcagctggatggctctgatttagagaacaagtattttcttcttttcacacaatctgttcctagaagcgccatcaaaacataaatattattttctcataataatataaggcatagtgattttattcttagccaaggatttagtgttgtagaattagttataattaacaatgtgttagtaaagttgagatagtattttaaacctatctgagtacttaaaataatgtaattttgctccagattctgccaaaaaaaatggaaattatttaacctaggattctaataactaacagtatccatagcattaaaaattacctttacatattgtaaatgtcacctgcctacaaataacatgtccattaaagtaaacattacttaaatatgcagctcaacagggcctggtttctttacaattaactagaaaatttgaactaaatcttcctgaagatttcttctctattaaaaacaaaagctgcctcctttccttgcttcacagctttttggacctgcctgtgatgagtgtcctttattgcccagtgtaattttgccatggtttttagcaatctgcaaacactccagcccaggtaacctgacggtagcatagacaggaaaggaggggatgtgaatttctgcctctctgcctctagtggggctgctaaggtaccagccatctaaacatctgcccaggtcttggtgcagtccagcttttcagcagagtcaagggcagaaattctgcccgacttctgtgtctggtacctatttgtacaatgcagaggtcccatgcaaattgttttcctttgaaataaccttaatgatttcttcaggtttcaactacagtaaataatttgttaaataaaaatattagaatgaaaggggggaaaagaaattacttcctctagcaaatgagactcttaaattcaaatttaattaaccaagacgcccccaaaccacagagcatgtcacccagcgttgacaattaattagctttgctctgaaagagctacaggtacccagcaaagagttacggattaaaggctttactcgctctgcgaaggctgcccatttctagctatcacaccttgatagtggtttgttgcttcaggcaacaaattacatctgaagtgtgtgatttcatgtccgtttttaatttcacacaattgaaatatgggaaaagtgaaaataaagctctacttcttttcaaaataaagctctatttctttcaaaataaagacattaaaagtgaacaacactacttcttttcggtttctcatgctgttcaagataattttctatcaaacggtgaaggaagataaatactaaggaaaactctaaaggaatgagtggtcactcttggcttttaggcgggctctctgtttatggtagaccattcagcttcttccttttagcattaaattagcatatgtataaatgatttaactagaaacttggagctagcatctaaaaggcagcatggtgtaatgaaaagaacattagattccttcgattcttgaaatcagattatctgggatatgcttatcccttgaaggaatcttaattttagttggatagtccttaaactagaaaagatatacgtacatattttatagacaattgcttctcagccgaaaaatcaggcactgacattccatgaggaatggactttaattagccggtgattgtctttctctgtctatatttataggcaaccgaaatagctgggttgtaggtacatggtttcatcaattccatttaataagaccagccagttcactatcattcatgttcatgaaagataggaataacgtcagttaactaaaatcatttatatctggctttgggatggctttttttttttttttttttttttttttgagatggagtctggctatgtcgcccaggctggagcgcagtggcgtgatctcggctcactgcaagctccacctcccgggttcatgccattctcctgcctcagcctcccgagtagctgggactacaggcgcctgcaaccacgcccggctaattttttgtatttttagtagagacggggtttcaccgcattagccaggatggtctcgatctcctgacctcgtgatccacctgcctcggcctccgaaagtgatgggattacagacgtgagccaccgcgcccggcccgggatggctttttaatgcatgtttaaatggatctggtgtcttaggtgtttacagttcttttaatttatgtattaagcccagtttccataattgcatactaggtggaacttaggaaaaggcaagaagctattaagtttccctggtactaagcaggcctgggggtgggcagatcaggccaggaacataaagacctgcagtcagggagcatccgataagaacggattgatggtcaaaaggtcagctggcacagggaaaagtacgtgtgcacctaagtgcagatgaaaaagaaagatccacccacactggcgccgaggcttgcaagtggatgtctggcaagcaagcagaagccgagatgcagatcaggaagctaaaataaagaagctggggcatctgggaagaccgagacccagggctccgcacaggctaaacagcaggaagaagagcgagtagaattggggtataggcgtggccaggtcatcagttacccaggtgcacggcggctgtcaggaggtcaggcagcaggcaaaactctgttcacaggtaggatagtgtgagggatcctgcccgctgtgctttctcaagtagggactttttacctctcattgtccaacgtacttctgcttttctcctccctgatgaagatcttgtgactgtgtactggcaggttggagcccacccctccaggacagcagggagcaaaggaagggtagctttgtaggtgtgggtggagataaatattcatgcatgggcaatgaagcagctctaagctatggaatcacatgtcaacccatatgtcacgtggcatcaaaggcagtttatacattggtaaaatgttcctttgaacttttctattccacaggaattgggaataagttttgggttatttcatcttccagtgtccttaaaaatgtggagcatgctctctcttaaaaatatgaatggttgctgtggcttagagcaagtcgccaccttcccgaggtcatccaactctcagaaacagaacttctctgttttaatgagtgtttttctctagatcttgacctagaacttgttgtctaggcagtatctgggtctgacttactaggtttgctggacagacagaaatagaaaagtgcaatgagacaatcgatatgttcttaggtgcccacagagtgtggcaccaacttgtcaagttctggacaaaattagattcattagtgcagaagtcctcaaccttctcttgggtcctgaagcccagcttttgcagatggcgtcttagtcattagtaaggccgctccatcggagtccccgtcatacaaaatattaaaggaagctgtgaagatcggttgcagtgtctgctatcctgctgtcgtctggccagaggtgagccgagactgtggggcagcggggtactgagcagctgctgtataatgagccgagaggggttaacccctggcaaggcaagcagaagagtcattcttaacatgcttagaatcccaatattcattgcagcagcttcaccaaccctgaaaaaccacagcatcagatggtttcttagtaaatacacttatcagaaacagaggcagagggtgcttccctttgaacttctgagacaaaagcccccagcaaggcatggattctgccaccgacggagtatttatttggtctttctaaaatccagatctctgcagccaggaaataacaaactcttgctttgtacttctgtttagccttccatgccaatgactatttttttaattaaatattttctgctttatttttgtgtacaaaagtgtctattttcacacagggaacttggctcagcaaacattcgtagttacttggctttaaacaaaggagaaggttttacattgaatagcttttatttaaaaattggtttatactatcgaaaggaaacattgaggaaaccccccagggcatttggactgggcacagatttcttgaggaacaccccacaagcacaggtaaccaaagcaaaaacggacaaatgggatcacatcaggttaaaaagctgccgcacagcacaggaaacaatcaacaaggtgaagagacaacccacagaatgggagaaaatatttgcaaactatccatctgacaagggattaatacccagaatatataaggagctcaaacaactctatggaaaaaaaaatctaataatccaatttaaaaatgggcaaaagatctgaatagacatttctcgaaagaagacatacaagtggcagacaggtacatgaaaaggtgctcaacatcattcattgatcatcatagaaatgcaaatcaaaactacaatgagattatcatctcaccacagttaaaatggcttttatccaaaaatcaggcaataacaaatgctggtgaggatgtggagaaaagggaaccctcatacactgtggatgggaatgtaaattagtacaaccactgtagagaacagtttggagcttcctcaaaaaactaacaattgaactaccacgcaatctagcaatggtagtactgggtatttatccaaaggataggaggtcagtatatcaaagagatagccaagctcccatgtttattgcagcactattcacaatagtcaagagttggaagcaatctaagcatccatcaatagacaaatgaataaagaaaaggtggtacatatacagaatggagtactcttcagccataaagaagaatgagatcctgccatttgcaacaacatggatggaactggaggtcattatgttaagtgaaattagcgaggcccagaaaaacagacttcacatgtttttatgtgtgctgcccagatgacacaattcaggaaaatctttcagctcctaccagagagtaaagctcttcagctgtagtgggtttacctgctgtgtgtcttcaggcttctcccagttctttatctctgctgtggagccaatataaagttatcaataacatttggtggtgtagatgcttctcatctgtgcaatttaggagtagactctaatacagagcagctgctgggtgaaccaaagatggctttagtgatatttatagcttattgattgcatagttctttgtctgtgattatcattcaataaatactgatggactgagtttcccggaacactgagattcgttttaagcagcttccagcattctttctgtgtatgtggggggaggttcaggaggcagtagaaggtggccataataatgttgtcttgtggtggtagtagttgttataatttcccttttatatcctaattctggccacgacctaactcactgtactgagacattttccccctataatatggagatatgttgctaagcaaccagatcagtaattggtaagtgcttatgtataatatgatttgatttgagttacatacaaaaatatgtaaatggttttttatcttcattattagataaatgattatcatttggttttattttgcccaaataaaataactgctttcatttaccaaaattaacatgatgtagtagaaaggccttggatttagaggatggaaacacgaatgcaagtcccaggtctgagagtcagcagccctgtggccatggctaaagtcagggaacttgccaggcctcgttcttttttttcaacccgtaatgtgtggtacaaataccttctctgctggcctcccagggccaggttaaggatggatgtgatgatgtatagaaaatgttttaagaaaaaaaaaatccaaggtctaagcattgtctagaattccaggctacttaatcttggaactctgagtctgttagtataattccaaaggctggattgactaagaagtactgtcctccagcagggcacagagccatagggcaggtctgcgcctatagaagaaagtaaacacatggcatggaccctgaataagtgaacagtgcagtgatggtggcgaggcagaagcaaaaggccacatggtcaagcaccctgtcattaagcattaaaacataagatagatcatctcaagaccaactgctggccaggtgcagtggctcacacctgttattcctgcactttgggaggctgagatgagaggatcactcgaggcgaggagttcaagaccatcctgggcaacaaagtgagtccctgtctctacacaaaaaacctttttcaattagccaggcatgatggggcacacctgtagtcctcgctactctctaggatcacttcagcccagaagtttgaggctgcagtgggctatgatcatgccacagcactccagcatggtgacagagccagaccctgtccttaagaaaaaaacaaagcaaacaacaaaaagacaactgctataagacttcaaggggaaggacaatgatccacgggggctgaagtcactgatgagggcaacttctacaagtccttgaagcataggaaaattcttttttcttttcttttcttttcttttcttttctttttttttttttttgagacagagtcttgctctgtcgcccaggctggagtgcagtggcgcgatctcggctcactgcaagctctgcctcccgggttcacgccattctcctgcctcagcctcccgagtagctgggactacaggcgcccgccaccatgcccagctaattttttgtatttttggtagagacggggtttcatcgtgttagccaggatggtctcgatctcccgacctcgtgatccgcctgcctcggcctcccaaagtgctgggattacaggcgtgaggggaaatttttaagggtaaattcacagcgatgatttccattggttaactctgtgcattaacatgcaaatgtcaatccatttccaaatgataacagtgcctggctgtagtattttaacatgatattgtttgaggctaatggccaccatgtttgcctcctagcagtaaacatgttatttgaagtcatgtcatgaattaccttcctgcactaatgaaatagataatttacataaaaatcaggaaaaaaaaaaccccagccccatatgcttttcaatctctagagccatggaaatgacctccctgacagccaattagaaaatacaaaggtgaaggtggatgctcttattcccgatacggagaagttccagaatgactagcgtgcttcttggctatgcccaaatacttttaagtaggtgttatttcataataaagcattaatggtgtttgttacatgtggatgaatatcttcactgtgtctgggagctctgcctcagaacgtaggatcttgttccctatccctgctgtttataatctgttttattaccttctcccactgtgtcatggaccggatggtttttctaggggctgctgtgatctgtcttgtcattgcttattatcagatagccttaatcctcagaacattgaaatagttctataatggcacgtgagccatggcagcccacagcagcactggccattttcacatgaaatggcagcctggattgtcctttacatgctgacaggggagactgtccatctgccacccctgtcctgggtcgggaccctttctgttcagcaggtgcagtggctctgagagtctcacagtttttcagttgatatctcacccatcaattacctgggttggatttgtagagctcgaatgacctcttaaattttataaacactttacccacctatttgagcatcccacacttgagcacccctcagacaagatgaaatattcttaggatagggttaggaacacacagtattcctgaaacttttaaagatatagaggtccttaaaaattaccatattgcctgattttcctgtctgtgccccaaggaaagttctattcttcatgaagctaataatttttaaaagattgctaggtcaatattttagtaatctttagacactaaggataggagatttcaatttaattctcatgagatgcacttagaatgacgggttttccatttgaacaccctgcagttctcacaatccagggtaatagtctgacaaatagtctattatacaattacaaaaaaaaaaaagtcaaaatcaagttccccctctaatctacataattgagacctaagactttccctgcacttaaagccattgaatccaccagatgagtgtggacctcatttttttaggtttgggtagatctggccaatgagagcaagtaaccatcctatgtgaagttcatttcagttctaaactgatccttgaattcagatattgtcatattgatgcattaggagaattgtcttgggtgtgagatgagtgaggctatggagagaaaggactggcactcagagggaagactgagcttactgggacattctagccaaggacaggctactgctcttctcctcactgcctgataatgctcagtgtggcaccactttttttttttttatttctgagacagagtctcgtgctgtcccccaggctggtgtgcagtggcgtgatcttggctcactgcaacctctgcctcccaggttcaagcaattctcctgcctcaacctcctaaatagctaggattacaggtgtgcgccaccatgcccagctaatttttgtattttcaatagagatggggtttcaccatgttagccaggctggtcttgaactcctgacctcgtgatctgcctgcctcggcctcccagagtgctgggattacaggtgtgagccatcgcacctggcccactttttgtttttttataggtgttcaggaaatattaatttcatcctgctagagagactttttccttgaaataaggcacagataattatatgaagctaatggatgtttaaagatgtatgctgggataaatagctttaggaaatatattgtactatccttggtaagaataagacaagtagtttttaagttatggtagtttttaagttaatttttctgctactggaaatcttataaaacaacccattcattttttcctatgaaagaaagaacttatcaggcattaattacataaaatatacttctaatcaaaatgtctttaccttttcttttttttttttttgagatggagtgttgctctgtcacccaggctggagtgcagcagcacgatctcggctcactgcaacctctacctcccaggttcaagcgattctcccacctcagccacccgagtagctggcattacaggcatgtgccaccatgctcgactagtttttggattttagctgagatgggggtctcaccatgttggtcaggctggtctcgatctcctgaccttaagtgatccacccacctcggcctcccaaagtgctgggattacaggcgtgagccactgcacctggccgtctttaccttttcaattctctcatgactgcctctcctttatgtccctaaataatacaattatacgtgaatgatttctcaaccttaaccttctcttctctgtgtcattgaagtgctatatgaaaagaactgaagctgctgacctctaagacattggaatatataaaaaaagatcaaacagctgcttataatgatgtcaaagataaaatgctattatagaatctatggctgtaaaaatgtgatttatattaatttttagtattctgaaaatttcctgatatatttattttatacacacattttaagaaaataattttatatgcattctcaagatgacttcctctatcactgtttttctgcattgaagccaacggaggctttcctaaatggagtagagtccaggagtcattgcagaatctctatactggaaatcattctggttccccactgcacgcatccctctccctcgtattcctggtaagcagttttctacccaccatttggatattttcagtgacaaaacacactcactattttatgaagccaacacatcactagtgggttattccaattttgagagaaatgtcgcttatacttatcaagctaaagatgcttttatgtttcacctgctgctttggtacctgtattacataggtttaacccctattcagatacaatacggtacaatacaggacacataggcctagattcagccttggctctactacttattatttattatattctttcaaaggatcattgattagtgtactaaatgctttacatgtactgtcattaaattctcataaaaagtctaaaaaagtaggtattatttttgcttcatcttcctatgtggaaactgaggcttgataataatatttataatagtgatgatgatgatgatagcattgtcatgtgccaactgtgttccaggcactgtgcttgggcctttataaacattatcagaatttaggtaacttccctaagattatctacctagcatctaggaagctggatgttcaaactaagtcagaaaggcctcaggatttaactgccttgagcttcacttgtttgtctgttaaatgggggtaatattgttctcctcacgagggcttctgagattcaaaaaaatggcttatgaaagtatctggcatccttgcttgaaagatacttccacatgtcatttattcatttctttaaagagagctttcttgaaagactctttccttcctctttctccaggtttcttttctccaggctaaatatccccagctcctgtagtcttcgttcattcattcaaaacataccgtgagctctcttccctggtaaaatttacattctagaggggaaacagacagtaaagcaataaacatggtaaccaagtaaagcatctgctatgttacaagataataggtgtcatggttgtgaacaaccaagataatggaaattaggagtctgggagtgagtggtgttttattgactgtggctgtgtgacaaattacccccaaaacttagtggctaaaagcagcaatgatcatttatcatctctcgaggtttctgggggtctaaaattcagataagacttagtgggtgtgatttatctctgttccatgatgtctgggacctcaggcagaagacttgaaggatggcatctggaatcctctaaaggctcattccttcatatgtctggcagttgatactggctgtcttctggggtcctcagttcttttccacttgaccctctccatgtgacctgggcttcctcacagcatggaagctgcgttcccacggtgagtgtctcaagaaaggaagccagggagaggccattattgccttttgtatccaaagctcagaagctctacagcatcacttccattacattctgttggccagggcaatttcagagttttgcttgggttcaagaaggaacatagacgcccacctctcaaggggagagtatcagtgtcaggttgtaagaagtgcctgtgggagacacatggatgcagccatctttggaaaggactgtctgccatgatgggcaaggtaggttcacggataaggtaacatttgagcgaagatttaaaggagatgagggagtgagccatatgcccatctccatctcggcagagcattccaggctgactcaagagcctgtgcaaaggccctgagatggggattggaccaagaatatttggaggctaggatgactggagcagaatcatcaaagaagagagtagtaggaaaagtggtctgagggatatggggggaagggacagaccacgtaggctttataggccactgcaagtactttggcttttactctgagtgatatggagagccaaagggagggccttgagcagacttaaatcttaaaagagttactctggctcctttgtgaataggcaggtggagagcgagtacagaagatggcagacaagttaggagactgtggcagcaattcagcaagagaagtctgtggctctgaccaagatggtagtaaaggtggtgagaggtgatgggatcacagatctactttgaagttttagccaacaaaacttcctgatggattatgtgtgagaagaagacaggtcagcatcgaagaagtcattggaaggatggaattgccattttctgatacaggaaatgctgaatgtgtaacagctttgcaggaaaaacatcaggacttcagttttagggttggcaagcttgagatgtttattagatatccaagtggaattgttgaagaggtaattagatacataaataaggatttccagagagggatctaagctggaaataaaaattgattaatcataggcattaaggatgttatttaaatcatgatcctggaagaaaacaccaagggattgagtgaagcagtaaagaggacaaggactgagccctgaggcctccatcgttaagaagctgggcagaagagaaggaaccagcaaaggaaactggaaaggaatggccagggtgtcctagaaaccgagcagaaagggtatcaaggaggaaggacctactcactgctctgagaggtcaagatggggctgagaaccattaacttgagcaatcatggtggtcattgggaacccagacaagagcagtttcagatgagtcatgggacacatgcctgaatggaatgagcttatagataatggaaggagagggcctgcagaaggccagcacagacaacactttccctgagttttgcggccaagatgggcaaggaagtagaacagtagctggctggggaagaatcaggagaaggatttgtgttttatgttttaagatgagagaaataacaacatgtctatgtgctgttgggaatgatctagtagcgtgaaagtttgtaggagggagagggaggagggaaaccttggagggatatcctggggtgtgctttactttcagggatcctcgcttttctcctcagcaggggatgtgtggggtgggcctgggtggcagagataagaaaaaggaaaaagccatgaggctactgcccgttctaagctgcctttcagtatcactcccttcccctgtctgtctctccatgtggactgggaaccccagcaggtaggggagtgggaaccatagccattgcctggtcctttttacactgtgaaaaggaaccttgaatgtagatggataaacaccatcttttagttcctggcagatcactgtcttccttcttgttctagtcctctgagacataggcaggctggcttgagagcagggagggatcgctgagcagaggtgtgtgcgggtgttagaaggtgccatgatgccttgtgccaatgactgacctgggatgagtcactgttcatttagggagagaatttcaaaaggaatgactggtcattgaataattccatttcacccttgattttagaaggaaagtgccaggaagggtagcaatgagatgaaaaaaaaagtattcctaggtttttcttttcactgattgaaaagaaagtgtcccgtgccttccctttctcatcatcctacaatagggtgacttagggtatcttcccatcaaaatcagtaattcctcacatatctcttccccctgtatttcactcttgtgaaacagattttcagttttacagatgagaacaattaagctttgaaatggtaacaccatttgctatatttgtgcagtggcaattttttagctcagaatttatcaaaagcatgacacttaatgatacagaattaaaaccagctatcccagaccattgaaggagaccggggtcggggagggagaggcggtgcaaacggtgttgcttttgtctttctgacctgcttctctcgtgatgtgttctgcaactggtaagaacattggatgaattataagattttaatcagtagaataaagtcagggcggtcctttcattttaagcagcagctcaaacatttgatgaggaaattagaatccttagaataagagtttagtgtgtaaacatcaagaattcatccagaaatgagtatattagagtctgtgaaatgccttcgcctcacactgccccttcccctgttttcttcttcttttctgtgataagatgatcatggatttgttttgtttttcttttgagacggagtctcactctgtcacccagcctggagagcagtggcgctatctgggctcactgcaacctccgcctcctgggttcaagcgatcctcctgcctcagcctcccgaatagctgggattacaggcatgcaccaccacacccggctaatttttgtatttttagtagagatggggtttctccatgttggccaggctggtctcgaactcctgacctcaggtgagctgcctgcctcggcctcccaaagtgctgggattacaggtgtgagccaccgtgcctggccaagattatcatgttttaagtgttacaggacacttgaatgatggacgatgtcattggaacagcctatgttattaatgatgccggcagcctcccctcccacctttccctgccttcacactctgtgcccccttcagtgctttgaccccttactcctcgcacttgaccatgaattgcattttgtatttaaagacctccctgcacaatatcctcttatctacgtaagcagcccatagcctcagcgccctgcaccctggttggagttcaccttctgatttggtggtatatttctaaaaccagtttgatttttcctgttgcactggggcttgtgtttttcttccagtgccctgtacatagcatgccttgactggtctccacatcgttcttcatcagactggtttggattttacaaggtgttagagtttttaaattagctcatgaggtctctcgcacctgagtttatgccagagaagttgtggagtgatgaacttaatgggtgcccttatccccaaagatgcccagctttgttcctgcttaagctgaatgttggtggataacacatcattctttgtaaatcgtgattgcagaatcctgctattttatggctttgtttttccttttgtcgtataaatgattgggtagctcgttaacttcactctgttatagtaagggactgctacagaggacactgagcaggaggagagaaggaatgattaggcctcagaaagaacgaggggttgtttaagagaaaacgaagtaagcctagcagatctgatcgtacaatcattttccccttattgttcctttttccactccagagctgcccagaagttaaatctgtcttctaaaaagaagaaacatcggccttccacttcttccgctgccgaaccaccgctctttgcaaccagcttcagtgggattctgcagacctcccctcccccagccccaccctgcctgctgagggctgtcaacaaggtgaaggacaccccggggctgggcaaggtaggaccatccgccgtccctgccatttgcccagtgtgcgaggttctggatcaagtttcaggaggaagaaaatgaggcctccaatgtattaaaataagacgttgccagggagaaaaggaggcaagatgaaattcatttgaaagtcctgaaaattgtcatggttgcatacactaagtggtaaactaagaccttcagattgtaagagatctgatttgcttttggtgggaaaaatcagctttgcattgtttgacagaatcgtagccatttaaagaaaagacacaaaggcacaaaatatcgaggcaggggcaggagaccgagggaggccacagcacaaggtacagaaatgagacgtaatgaggcctcataatttccctgtgacactttcgagtttttgcctcctcttcagagaaatcctgacttctgctttgaagcagcccactgaggggattgtgaggaacgctgcagtcttgcctttctagccaacaagtgcgatttcgaattgttacaaatgctcaggaagagatgtaggatcgtgcttacaagctgttgctcagctacacttgggatcactttatttttaaatgtcatttctaaattctttctcccttccgaggaaagcgtttgggtgaagtaacttacggtttactcatcattggtgaataagccagggctcatacaaacatgtagtgaaagaaagacgtggcggtttaattttttatttttatcaaaagtaggagtggtgcacacgacctcactggtcctttacagacttatcgtgactccggccctgggcttcatttggccgccgttgctagtcttgctgaagctccggagcaactactaaactgtggggatttagattttacttgttcagttcgcagactgccagtcccctgggtacccaaacacggtcatggctgggtttctgggcctcagaaggcctctgtctctctggagtctccccttgcaccctctaccctctcttcttttcacctttcccagtttctcccgtgtccttccatgctctcccaccctcaatctcaccacctcgttgggaaggtattaacttcatgtggtacttttcccaagaagagtttaaattttaagattacatggaataggtcaggcactgtggctcacacctgtaatcccagagctttgggaggccacagcaagagaagcacttgaggctaggagttcaagaccagcctgggtaacatagcaagaccctgtctctacaaaaaatttaaaagtcagctgggcacagtggcagatgcctgtagtcccagctactcaggaggctaaggagggaggatcacttgagcccaggagttagaggctgcagtgagcaatgatcgtgccactgcactctagcctgggccacagagtgtctctattttttgaaaacttacattgaacagagcagtgcctcctctgaggggaagcatccagtcctggagctttccttggtggtgggcagggcagacagttttcagctgagggctttcccaggcccagcagcaaagtaagacccaaggaggcagggaagtggcctgggctgtctacagggcctgccccagcatcactggacatggaagcaggtggaaaaaacagtgtggaccaggactcctgtccaggagaggactcagtgggtgggagcccccgaggaggggccgtggtacgccacaggggcacacgggtgtgatcgtggatggttgattcgctgccttctaaggagggtgggtccaagtaactgctgggatcttctattcttttttacattttttatttttaattgtggtaagatacaggtaacataaaatgtaccatctgaactgcttttaagtgtacatgggctcttgttttgcaaagagggatttggaacttcagtgccggagctgaactgctctggacacagtgaaatcaagctgtcagtgcagtgaccttcccctcctgtactctaagccagttctcttctgaataagtgtgagcaaatgtttaagtggtatctccttgaaaaggtgccagatgatcagccagcctggggtgctcatgtaccccaataccgccctgtccagggcacctcaaaatgaagcacatcagaaaccgtcctcctgcacctacagtactggccttgtctgtggttcctacaagggttgatgtggatgcatcttcaggtggctccgacctctccccctctatccctaatgacctccctggaattctgagacaaggacatcagggtgccaaggccagggaccaaaacagcagaaagagtgtcccagccagcaggatgacccagcactgacacaaaaatagtttagagggcaaaggacactggtccaatcttgatttcatgatgtaccatatgtagtgaccacagataaggggccttacaatgaggagttatgcttgttagtaaactaaagtttgcatttcacacttttttaaaaaaattaaagatatctctctcactgatttgcaatccaaaatgtaatcaaagccctgagttcacccatgagactgtgtcgaggagcggggcatcggtctggggtcacagaacatcataagagaaggtgtggcttccatctgcccagtggccacgtggcagctgaggccaccctcctgatctgctcaggcttctggggcatgggtaacagtgagggggaggaagtgacagttggagagaatgtgtaccatgattggaacaagaagttggctgggcgcggtggctcacgcctgtaatccaagcactttgggaggccgaggcgggcggatcacgaggtcaggggttcgagaccagcctgaccaacatggtgaaaccccgtctctactaaaaatacaaaaattagccaagcttggcggcacgtacctgtaatcccagctactcaggaggctgaggcaggagaatcgcttgaacctgggaggcagaggttgcagtgagcagagatcgcgccactgtactccagccttgacgacagagcgagactccatctcaataaaaaagaaaaagaaaaagaaaaacgagaagttgccaagaccctgcctcttcctgcacagagcatctggttcttccatttcagcaggctcttactctgccctaccatatggtgccaaactgcctgacctcagcgaaggcccatcctcccagactcctgctctctccacctccacggatatctcaccatcattaggaacagcagttctttatacccatgtggaaaaatttccatcaatttatctgttgcataatttatattttaatatcaccaagaaatacagtggagtttaatatagaacataaataattggcgctatatataaatcggcaggtttgaggtagacaagtttgatggaattcccaaaagcaagttgattgattatttaaacctgacctggagtctcctagagtggaggaggggagcaggaatctccaacgcttgagatggccctgaaggtgagagtgttgtcacccagccggaccactgcccctcagcctcagccacccaccacctccctctggaaacctgggaggccttcctccataggaacagatttcatgggtttatgtagagcaacttcttatttagtagacaagaaaactgaggcccagtgaaggtaacaggttttccagtgactccagaagcagggcaagaagtcaggacctttcggccattttatttcctactgtatcactggctgtcactagataaacatgacccttgacaatttggggtggagacaagagtgtcatggaactgcagtggtagcaaaataacgttgggaaccaattgcctttgtccagtggggaaagacatacttttcagagtcaggattgggagaggaaggggaataacagccaagaatagatacacagaatgagggagaagggaggcgtgctatcccatcccttccctccttcccactccctgctgtttccagcaacaatcccactccccagccaccaccagggagtcatttctggccactgagcacctcttgaggcaaaagcttttctggaggccatggtgatggaagaaatggaggtaatttccatgtacttggagttgaggcatgcacacgcacatgcgcgcacacacacaaaccatctcaggatcctctgcccctagagcatttcctgatacacagcaatttttttttttttttttgagacagagtctcactctgtcccccaggctggagtacagtggtacaatcttggctcactgcaacctccacctccggggttcaagtgattctcttgcctcagcctcccaagtagctgggattacaggcatgcgccaccacacccagttaatttttgtatttttagtagagacggggtttctccatcttggcgaggctggtctcaaactcctgacctccagtgatctgcccacctcggcctcccaaagtgctaggattacaggcatgagccaccatgcccagcccacagcaaatatttattaagcacctactaggtgttaggtactgtgctgagcggtaggcttaggtttgaaataatggacaaggcagagcacctgtccttaaggtacttataacttagtgctttattccagtcagtcttagaaagctcaccaatttgggccaatatgaaggacaatctgatttaaggaaaaatcaggattgtaggcttaaaatgattctgtctcactttgaagttacataaacaaattatgctactaagtagtcttatagagatattcttaataagcagataaagatgattagtggatcaaagcagcttagtccccattcatatttcactgatttggcttatatgtaaatgatgattctaatctgtttgaaaacggttgcttctcctaagtcagttcttcatgaaatttgtttgcacaattaattaacatccatgtttaaggttcatttgttagtatgtcacagcttaatgtcagagctttctgtcttggattagaagcttccagagcaaagcatgttatctgtttgacttgctaagtatatggctctgcagccacaccatggtgcatcaacatttttaaaagtgagaatggtaatggtgacagtcatattggattgatgacaatcaaccttttacccttttagggtagaagtcattcagttactaactccttgtgacactgtatggaagagaaagacaagatttctgttcagtttacattcttcttagaggaagaggagaacaagatttttaaaattagattaaaatactgtggttttttgtttgtttggttttggttttgttttttttgttttttgttttttgagtcagagtttcactcttgttgcccaggctggagtgcaatggcacgatcttggctcactgcaacctccacctcctgggctcaagtgattctcctgcctcagcctccctaaaatactgtttttaaaaaaggtactcggtagctgttattcactcagtcaacaagtagaaacagtggggatagctctctgttgttcaggaggtgatgccggggaaaatctcatgcctttcagcccaccaaggtgcagtttatttacacacagattgtccaattcctcattattattgctgtccttcctcatcctgaagcatgaccaaagagaaaagctctgagccagaattaacatctttacttcaagtattcataaagaattcaaatgtgatggacaattctggatcccactggatcccagtagattctggatcccgctagatcccactacactcacaacttcattcttaaacactaaagttgggaaaagcaaattgtgagttctcttttattttggttcactgttggagggggcgggaacggcataaataatacctattcatcactatagctagcctgatagctttgtaaattaaattgttagctcttctgggaaattaactcatgtgacgttaaactccatagttaagcttacgtagagttgggggtggtggttgttttccctttcttcctttatttcttattttgagccttccttcaaccgatacctccagagaaaggcgacttggggaaaatgttctgactcttaatcttcgcggtttcttttttcccacggatgtagatttcgccagcctctggacagcacatgcgcagtatgctgctagcgccgccccaggcgcccggagctcaggaagcgcaggtggcgctgccagaagggccatgctatttctggggcaaacctgaaagacctcagacacaggggctttcttctatgccatgccactgttgaacttagcactccccgttcttgcaaagagtgggaactgttaggagaatattctccgttagaggttactgggcaggaaagtcatcccaaggacgtgtataaagaaagtgtgagccaggcatggtggctcacgtctgtaatcccagcactttgggagattgaggcgggtggatcacttgaggtcagaagttcgagaccagcctggccaagatggtgaaaaccctgcctctactaaaaatacaaaaattagccaggcatggtggcaggcacctgtaatcccagctactcaggaggctgaggcaggaggatcacttgaacccgggaggcggagttgcagtaagccaagatcgccaccactgcactccaggctgggcgacagagcgagactccatctcaaaaaaaaaaaaaaaaaaaaagtgtgaagccattttcattcattattaatatgatcacctttaattctgctgatgagggtgtgtggatatcattttctgttgtcttcattatcaaatggagaactagaaggggtaagcagcacattttggtttaattagatcagatttatgataggatggcatatcgctacatataaaatactcattttctggcgttcctggccagagatgtctacacagagcaaaatggatgaaaggacccacagtgagcagggaggactggtttggtcctgtagcccagagtctcctatcttatataccaggtctgttcttgagctttcagagtgcaagtagagaaacagaatttagcatccactttctccgtggagatcctgcatttcctacttctctgaacttcccctgcctgcttcatatgagtagacaggctcttctgaacacatttttgtttaagtttcagggacctgacgccttccaggcactgatatgtgtacatatactccacaagacgtatctatgggcaagctagaattcagccccttatgtttctagtggaatgttcatttcagtttccgtcactaggttgttagcttcttgggaggaggaaacatgttcttttcatctttgtaccctttcagtgccagctcagtgctagaaaggatacacaatgtggttgaacttaaaaaaaaaaattctatacagtccgtgtgaagtcttgatggggcgctgagcactgtgtagggtccgtcctgaaagaggcagctgcaaaaatgaggcagaaacagtgaaaacatggacgtgaccagaacccagtggtccttggctccacctgctcttcccagggtgcgagttgtcccagggttttacatcaggaagaaggtgacgcttcatgccacacgctggcaaagaggaaacagtgtccacattcctcactgaggaattttctcgaagaccttcttgtcctgtcctctcattttgcatgtaaggaaactgagggccagcaagaggcactaacttgtcatcccactttgtgggagaagacaaaagtttaaacttctgaatgtaaaagatgatttgttgtggaaaactgttaatcagaatttgaataagagattcgtaatcttttcctcccattttgcaacttttttttttttttaaaaacagggtttcactcttgttgcccaggctagagtgcaatggcacaatctcagctcactgcaacctccgcctcccggtttcaagcaattctcctgcctcagcctcccgagtagctgagattacaggcacccgccaccatgcctggctaactttttgtatttttagtagaggtggggtttcaccatgttggccaggctggtcaactcctgacgtcaggtgatccacccgccttggcttcccaaagtgcttggattacaggtgtgagtcacagcgccctgccccattttgcaacttttgatctcaattctgctggctctattttaaggtattaaatggagatggtaggcttgtgtatgtgtgtgcacgtgtgtgtgtgtaagtgtgtaggaggaggagaagaaagataatttttataaggggactttttaaaagctagcaacctttatcataattggtggacagccttggggcctcctggaatacctgtaattcctaattagcatcctgatttatggaataaaaacatgagataaaatgagggaattctctctggaataaatgccactgtctcaattaaccaaagggcaataagatggattataatgccagaatagggcttttgatcagtctttgtccaaaaaccacattttagttaagctcagcacaattagaccattactgatatcaggagaatggaaacagtaggtatattttaagctaacattcccagcatcttatctttctatagtctttctcttgttaatggatgaaaggaaagttaagcatgatttgttataattatcccattaaaatgggatcgatagaaatattttatgttaaaaaaatggtgagtccaaactgctgagttaattagaaagttttcctttgtgcctcaaacagaataggaaatgctgttcttgcctactgaattgttcgtatcaaatagaaaatatttgaatccctttctaatgcctcattgaaccaaaatgtattattatggagggggagaataattccgatacattctttttttttttgagacagaatcttgctctgtcgcccaggctggaatgcaatggcacgatcttggctcactgcaaactctgcttcccagattcaagcgattctcctgcctcagcctcccaagtagctgggattacaggcatatgccaccacgctcagctaattttgttttttagtagagagggggtttcaccatgttggccaggctggtcttgaactcctgacctcaggtgatccgcccgcctcggcttctcaaagtgctgggattacaggaaaaacaaccaaaaatagaacaattacagtagcaccgagtgctagagacaaatttcctgccaaatctcttttccagttccctcagtctgcgtctgtgttctgtgccacaaccaaagattcagatatcaattttgtccacttgtagctcatttgagatctgttaagcaacaacagtgaatgctgggtggattcgttagtggagctctgttccagctgtagctaataaagttattttctcgctgaaatcggtgatggtaaaattggtctgttttccaatgctagcttcttcagtttccgctgagttcttttctcctggagtgtgagatcacaatggcatgccttacaaaagagtgctcttgcctgctccgtcctggctgctcccaggccgaccctggctcctcaccagcaccctgctgtaaacgctcagctgccccttcccctagcagcagcgtcggcactacatttaggaccctttctgtatgtaccctgaaaacccaccggcgcagtggttaggctggagcagctcaggccagcctggggcaaaaggcagaggactgagaccatgcagtgagattggtgcagtcagtattggtggaggagctgctgggggccaggcacatgctggaaaagtggcgtgttatgtcccggggtctgaagcaagaatgggatcaggcagtgtggaaccaatttgtaaactcctcactcactgactgtcattagtaactaagttgctacaagctctttttttgtgagcctcaaaacaggaagcccagaagagtttacaacaatggaaactctcaggtttctacaggaaaaaggagaatgttgttttccccaaaggttatttccttctgcagcctggccatgtgcccctttccctcaagtttgggaagcaggacaaagggccctggggaatgccttagcccatgatgagctgagggacagtcatttttgtcccgtcatcatgcatttgatttgctccttgttttatgtaaatatataattttagacagcgtcttccttcgtcagccaggctggagtgcagtggccctgacacggttcactgcagcctcaacttcctgagctcaggggatcctcccacctcagcctctcaggtagctgggaccacattagccaccatgccctgctaattttttgtattttttgtagagacaggatttctccatgttggccaggctggtctcaaacacttgggctcaagcgatccacccgccttgacctcccaaagtgttgggattacaaacatgagccactgcgcatggcctgttttaaacattttaagaaaatattttatcatatttgcacaagaagattttcagtgaaggacaatgttttgaaaatccaatcagtaagatactcgctgggaggtatttttatagaaatccatggaaagctaatcataggaaatcggaaaaacagagagcagggtttgtagcttggcctttcccctaccttgttccgcattctataaaaagtgaaaaagtagcaaagtagcaccctacagggggctcagaggtgctggaggactaataacgcaccatttgcatgtccacgccacgcgaccctgcagtcacgctctgttacaagtacagatggtgaaagtgtggccaggaatggatgccggaagcccagaaggaagttggctcttgtctggaggctcccagggtggatctgcacagccttcccttggctgattcctgtccatcctgtggatatcagtgaaatgccaattccttggggaggctttccctgccaacctccccaaccccaggttatccaggctgggtgccccctcgtgtgcttccgtaaccccccaaagtttctcctcattgcattcatcactctttagatgactgatctgcgtaattccatgttcagtgggtctccttaacgaatgtaagctccatgagggcagggccatgtccttcttgttcccctttgaatccagagcactacacggtgcccaactgtcataggtgtcataggtgctcagtaaatactaggtgtattagccagagttctccagagaaacagaaccagcagggtgtgtgtgtgtgtgtgtgtgtgtgtgtgtgtgtgtgtgtgtgtgtgtggagtgggggtgggggattgactgattttcaggactggactcctgtgactgtggaggttggcgggcaggctggagacgcagggaagaggtgcagctggagtccaaaggcgggcagccgacaagcagaattccttcttgctcagggaaagtcagctttggttctattcaggccttcaactggttggatggagcccaccacattatggaaggtcgtctgatttactcaaactcagctgatttaaatgttaatctcatctaaaaaaatacctccacagaaatatgaccaaatatctgaataccggggcccagccaaattgacacattaccatcgcactaggggaatgaatggaatgatgacactggtttccattctgttgcgatgatccttcccatccgtataaggcctgacaatttccatgcccttgcacctatgtcatcttcctggattttttttttttttttgagacagtctcactctgtcgcccaggctggagtgcagtggggcgatcttggctccctgcaacctctgcctgctgggttcaagcgattctcctgcgtagctgggattacaggcacatgccaccactcccggctaatttttgtattttttatggagatggggttttaccacgttggccaggctagtctcaaactcctggcctcaagtgatccacctgccttggcctcccaaagtgttgggattccgggtgtgagccaccgcacacagcctccctggattcttaatacagccctgagaggtaggcagtggggcagtgcggggaggcaggggcttgttagatgctgcccatagatgagaacactgagattcagagagggcaaaataattcctagaggtgacaccgcttttcagagtggatggggtgacaccatatgtttgtttctactgttcttttccaaatcatacaacatatgagccattcatcttgtgccaagcactgttcagaaggctccatcctcatgacacccctgtgggaagcttccaccatcaccactcctcttttacactggaggaagctggaccggatctaaggaatctgcccagcatcacatgcctggtctgtggtggagctggcctatgaacgccaactctggaacctgtcctctggatggctgcatgagactgtctctctataggcaccttatgtggtcattttggtttcagaagaggtacagtaagcaaatgttcctggctggcgtgctgcagctgccttggcggggtggcaggcagggggctgtggcggaggctgaggctggtcgtcctcctctgccgctgacagtcccaagctctcttccctcatcatctcagatagctttgtggttgtcactgtgttgttttatatatgaatattttttatggatttttatatatggattgccgtgtgacttatgtttccctgccctaagcacaccgatgaaagtacattaatactcaaaatgactttgaaaagaccaaaagaaacaaaaaaagtcctaaattccgtgggaggaaaaaccatgatcctttagccctactccggaatagtaagaactgagagccaaagccaaggcggggacagcaccctgggagctgatgggctggttagtcccatcccagattatatggaggcacccgggtgattccatttcattgagaattctgtgtctagagcaccagacagtgaccacagaaatgtttaaacttcagcttttgtttaaagagatgtgctgtgagtatttatcgagccatggtctgtggggacactgctgggagagggagcatttctggaacccatcgtggctttcttccttgtctggcctcggcttttactttccttttttcatggacccctctatctcttgtgtccaaacccacctacttttccaggtctggctaagtgccttcttcctcccatgtcccacccctgtcccctactgagcccccttttctccgtgttttgtatcatgtaccatcccttgcccagatttctctgattaaccattcaccactctgttgctgtcaccgctttatgggtctaggttttctcctccactgagtctttaggctacttgagggtgggaatctttgttcctattgcgttcatatccctgaaaatgcttagccatatgtcagacagacagaactccctgaactgaaaaacacaaagatgtggagaatagcacagtccttatatgactttttccctgcttgtccctatcatttacccatcacctcttagtccatctggtcatccattgattcattcagaagacaggtattacgtatcttctatgtgctagttactttggggatacccagatgagttaaacatggtctctatccttaaggattccagaagttgctatcagaaagagttaaaaatcattcttcaggtagatagctcaaactaaaaatacctgttattatggccatcactccggcttaccatggcagataaggctgaaatttgtcccagataattggcttcctggtgagctttctccctccttctttttcactgagtatacgctaatattcctccagtattcatactgcatggtgaggacagctgacggtatagcagccagggaaggctgcacctgtgtttccattttagcgctttgatgtgctgcatgcggttgccctgcaattagttcatatgcgtgaatcacaatggcatatgtaaaacgtgtgctcatacagacccctctccaaagacctcacgcatcctttgcttctggagagaattcccctgaatgtatgtgatgaggaagttgggcttttcctctctgtgccaggctgaagcgaggggctttgctcaaggtcgtatagaaagtcgtctgcccttccaggccgtgctcttccattggaggcaacacctgggcgttctttgttttgcctttgccgcagagggagaaatgtcatatctttcaaaattccagtgtttcctagtcttctttgagaatgcccctgttaagataggtgagaagcaccaggggtaggcgagattcttggataatgtgtgtcctggaaggtggtgtattctggaatggggatgggaggaggggaaaaggataaagaagggaattcttttcgtttcaagcaatagaaattcaaactgtgatgcctcatggaaccagaccatgagaaggtcatgagcgcctggaactaagatctctcgagtgctccgggacgcttctcgcctcgtctcttacgtgtgcttcttctcacattttggcttaattcttcatttcaggccagctttctctcttacagctgccaccagcagactggacagactcctgtcctctctggccctaaactcaaaacttccaggagggagctcagatgagcgggcggttgggggtcaggaagcggctgctcagatgaagggggtgctggggttggggtgctcaggagcatctgcctgtgtggaagacgctatcctacaagaaggctggaaagacagacaaacgtcaccccctgcattttttgatggtttgtaggaagtgtcagtgagcatttaggagaaaaacccaagaccaggttacacagagcatgtcaggtctcaaatcccgacatgactcctgtcaaacccagtgccagggaggaggggagcccttcacccaatccgtatttaccgagcattgactgggtgcctgtgaaatgaggacttgggggggttcattttgtggaccactgatttcacaatcatttagcagtttccagggggagaaaagtggcctgcgtattcaacagagcttagagaagagactgtgtagggatttgcccagggagtgcagtagggagaggtgcatcaccaagaatatcggagacttctccttagcaggctcatcgtttccaaagagatggagatgcagtcccgagatagcgctccggcttgctggggacactggctccaggtggacagtcttacgtctgcctggcaatgctggctatgctggctatgctatgacctgcttcctctgtgaaacagctgctgaacaaaaatgcccaaattttagcacatcaatctcttcttcttcctcctcctcctcttcttcttcttcttcctccttcttcctccttcctccctcctcctcctcttcttcttcttcctcctccttcctccctcctcctcctccttcttcttcttcctccttcttcctccttcctccctcctcctcctcctccttcttcttcttcctccttcttcttcttccttctttcttctttcttcttctttaagaaagggtctgcttttgtcacccaggctggagtggagtggcgtgaacgaacacagctcactgcaggctcaacctccaaattcaagcgatcctctcaccttaggcccccaagtagctgggactaccagcatgcaccaccacgcctgggtaatttttgtatttttttggtagagatggggttttgccatgttgcccaggctggtctcaaactcctgagttcggatgatttgccggccttggcctcccaaagtgctgggattacaggcatgagccactgcatctggtgtttttgttgttgttgttgttttgagatggaggtctctgtatcatcaagaatggtctcaaactcctgggcttaagtgatcctcccacctcagcctctcaagtagctgagtttacaggtgcaagccaccatccccagccaagcacattaatctttatgaaaatgttttgtttctgcctttccccactcttgcaatggctcaccacagtcatcccattttcccagcagcgtggaactcacagtcagaagggcccattctccaaaattaaccccacctgagagttacattatgtaacacactgggagtgggggacaaggaacatctgtctccatctgtgccaggtgctaacttcctgtgtcgcccaggaacactcacctaacacctccgagtgcctccacaaaagtgccaggccatgtatgtgggacacttgctctgcagtgtaagcaaaaatgggtgcagttttaaaaatattgtagaattctagaactttccaaataagttggataatatcagcagttggtattcatataggttgaccttcacttggcagaacagtctgaacaggtgcgtagattttaagtagacttgaatttgaaggctaaggtcatccagatctctttgcggatgtggagctggaatgaagccctcctggctttgcctcctctgccgtcgtcgcagccggcaggtcccagctctcctctttcaattgctgtgtgaccctacggaagatattcagtttttctgggcctgaacttctttatctgcaaaacaggaaaacgaatcatacttcctcagagggtaattgtgaggctccaataactgtgctggagaaagtggggtatgaggcccggtttggggctgtgggagcacctcttccttctgttggtcctaggagctcagcgcttggtgggatgttccagaccaggagaggctgggactaaaattccagagtgatctatgggtgcagaagcttcagacgcctgttcaagagatgggtatcaggtgaggtgagtccatatttaggtctccagctaggatttaaacctataaggggaagaagcacaggtgagctacagtaattttggctaaaggtccaaactgaggccaatctcagggcatgtccctctaactagaggtaaggcatttagtcaacagccctccaagctcaaataggcagagggtagaactgagggggaatagcagctgttactaggaggctggtcactggcaaccttgggtttcaggagcgagaaatccatcctggatactgcgaacgcccttgattcttagaaaagtagggtcctggcatcaaagctggagcagtatggaacggatgactgcttagacacagggccagtgggtgatcaactacagcctcgtagatttctctttggaggactggagtgactcccaggctcagtaggggactctgtaggggactgagcttggagaagcccacggccaccctgcctccattccaaacaagattattcactccactcctgtttagctggtcacatggctcccccattccttgctctccattgcccttagtccaaagtccaaattccccagcccaaggctgcagggggctggctccctggcctctagttcctgcttctctcgcctgcccccttgactccagtgagtagtttttggtgctgcaaagaggacacactttctctcaccttcgggcctttgacctgcccgggcagggccctccccatcttcctcctttgctctgaattcatccttcttcttcaagctttaatttggatgttatcccttcaccccgcttccccaaggaagttccctcctgcccctgaggcctcttgccatgctgggctctaagtgggcatttatttctctgtgcagagtttgtccttctttgaaccaggtccctcctggacaaggaaggtgctagatacatgtttgtctagccacagggatcagagctcagaaggttgcggggacagggcatcctgcctgccctctctgaatgttcactttgagttacttcagttactctttacctggacaacataacgtcggggaaaactcatttatttgcaaaaggcaaaatacatgacactgtttcactcagaagcccctcagacccagcatctcgccaacctttgggcttaagaagtggtgaaaagatggggagagagtgactgaatgcatttttctgtctaggcaatttagtattacaggagatgctctcaaatccttgaccggagtgaaggcagagttcttgtcagttatgtaagaaaaacagctcattgttatatgatgcacactgaacaccatcgtgtgttttctcagtctttgtgtgtgcggacacgtggcatttaaattaaaatttggccaggcacagtagctcatgtctgtaatcccagcactttaggaggccaaggcagaaggatcgcttgagcccaaagttgagaccagcctgggcaacgtagggagaccccatctctacagaaatttaaaaagtagccagccatggtggcacacacctgtaatcctagctaaggctgagacaggagaatcacttgagcccgggaagtctaagctccggtgagcctgtgattgtaccactgcactccagcttcggccacagagtgagaccctgtctcaaaaatagaatattaattaattaaaatttaaggaattctgtttttactacggtgagtaacaaggttttttttttggtttttgggtttttgtcgagacggagtcttgctctgtcgcccacgttggtgtgcagtggtgcgatctcagctcactgcaacccccacctcccgggttcaagcgattctcctgcctcagccttccaagtagctgggagacaggcgcacgcccccacacctgcctaattttttgtatattttattagaggcagggtttcaccatgttggtcaggctggtcttgaattcctgagctcatgatccacccaccttggccttccaaagtgctgggactacaggcgtgagccaccgtgcccagcctatttttgtttttgtagagatggggggtcttactatgttgcccaggctggttttgaactcctggactcaagtgatcctcccacctcagcctcccaaaatgctgggattacaggcgtgagccaccacacccagcctaacaaggttttttgttttgctcctgtaggtctattttttttttttttccaatcagtattttcaatgttttggctccagacagatttcagtggtgcatcacatgttaccgacgtgcctcccgtgcctccctgtctgttcatctgctgtcgtctctgccagggatgctcgtctctcattcgtttttttggcgtggaaacacgctgctcagtcctcaggcccagctcccgtgtcacctgccacctgcaggccttcctcttgtcccttctccaggcactgtgcctgtgtcccctactccagaccgtgagttgtggatgaaaggggctgtatcttacttgcccctttttgcatttattcatgtggatacatagatgctcattcgcttcaattcattgaacatctgctactggccagggactttttcccttttggaaggagacccagataccctccagacataggtccggcctctcaggagttttcattctcctgagagaggagagagacttgttgagctatgcgtggagtgctgcctgacagcttgctattttctttctttcctgtgagataaaaatgtaccttatggtattactttattttaattctgccatgacatttgtggcggttgttttaagattcagagattactgggtgttgatctccttatgatactctcggttcctaattatgttagaaaaaaaagcaaagcgggaacttggcttttgtgttgccttcacagagtgtggaggttgaaaacatctcagcgcacttcacggaggttctcagagaccccataagtttctggaaaagtgggaaacgcaaacctgtcaacctgtcagtctctcccctctcacggaagcctgacatgtaaatctcaagttgttaaacctgctgtcaaatgagctgcctccactgaagactcccctccgctcctcgcactctcatcactgcccctcactctctgtccccacagcacagggacagcctccgcagactcccgtgtgtgtgctctggagagaaaagattctggatttgggcggtctcacctccaaaattgcagcccctaaggggagccgtgctaaggtgtgatacaggccatgccccttctagccccatgggacacctgactgatagcagcctgtgcagatgtgaggaacagaaggtggccccagaccccttaggagaaaccaaagtgcctcagagacaggacaagtgctaccccggaggccagtcaccaggtgacctgggagctgggaaccttttcagcctatgggtggctgtttatcacgaggggcattagacagacaggaggcagtgctgaaattcaacagcacaaagcaatttccagcttcatcttggcttattaataatgaaacagcaatagcgcaggcacaaatcaacagtaagtaggtgggtgggtgagacaagttggacatttggggaacagcctgggcagctaccgatacagagggaagccatttggtgtgtgtacctcccctcttccctgggataggagcaaacctgaaatgagaacggcagtcatctgcacacaaaaactaggttaggaaactgttttctaaggggccaggttgggtcactctttgtgacaagaaccgtgtgaaccacttcttacctgtaattctgactcagcattgatatttgaaaattcttccctagggctgggtactgagtactgttctgagtgcattacatacaacagctcatttacatacgtaatacattcacatacatcaatcatttgcatgtatcaactcatttatgtacatcaactcatttgcatacctcatttcatttgtacataactcatttgcatataccaactcattaaagttgtctcttttactagtgaggaaactgaggcctagagagtcatgtgcatgctgcatctctgcatgcttcctctgatggtttgatgtgggtcaatcctacgtctgtgcacatcttaacaactatcgtaggtgtagggtgcctttggtttactagaggtttcatcagtccacctgattctcactactgacgtaaatgtcagaggtggtcctgcctcttctcagtctccatcccaaggctctttacagctttctgtggcctgattttcttgctgtggatgctgaagggcactcttcagtggtttctcccagggccgttgcggattgcagctgtttcatacccagatgacctggggggcatcttcagtgtgtgcagatcagactcagcactgatactcgtcctccagccgtactttgtctccgcggtggtgctcagacttaaagcacttctcagctgtgctagtggtcccttcagagaacgaattatgctgaggcagagagggacctggggagggtagggaaggtcacaaattaaacagcagattagaggacagaaattcggtttgtggctttaatattttatactcagtatgacaggcagactcttcaaaaaaacataacctagtggcccaaatcgcaattttacgttatactttcaatataggaggaccctcacattgcttaaaaggggtcttcagggagaaatttacccaaaatttcatgcttggctccgtggtgacggcacatcctcactctgagaaccaggaccggcctcgggagtccaggttctgttcccagtttgtatgcacaccgatttccccactgtctgtcacaaccagtcaacttcccatgtgttaacagttactgaatctacctgtccgcacgtggccaagccccgccccccccttcccccatgctcttctctctgcctggccaactcctcaatcttggcaaagtccttcagaacccttgggtagtgtgagttaccttcctttgtatagaatctgaaaaatcattgccctttttttattagagtcaggatctcattgctctgtcacccaggctggagggcagtggtgcagtcatagcttactgcagcctcaaactccggcaggtctcaagtgatcctcctgcctcagcctcccgagtagctgggactataggcatgcgtcaccatgcctgactaattgtgttattctttgtaagagatgggctctcactgtgttgctgaggctggtctcgaactcctggctttaagggaatcctcctgcctcagcctcccaaagtgatagaattacaagtgtaagccaccacacttgtccatcattgccttttaatctttgcatcctgccacctccccagcacagccagcataggagccggcacttagtacatgtttgtttggggaatgaatgtgaggtcactagtcaatgattctgaaatgagtctattgaaggtggaaaccagcacaattcaaatgctttgcgttaaatgccagtcagtgtctcttcccaaagacccccactgaacccatcagatgtaaaatcccccattttatcaccgaacaacctgtttccacccatttcccttattcactaaacaacccgtttccacccatttctcttgttccttcttattgcagtgggggacgtgtctttgccttctttcaagggttaatgtttccaagtgggttctatcttctcaaggatcactggtctttcgcatataccctcttgctcccgaatcattaagaactcctgcccattggatgatgttgctgtatctccaattatattttgaaactttctccctctcacttactcctccacgtgtcccatttctctgccttcttaatggccacttctcaaacacatggctgacagattccggaggccttcaactcccacctatgaagcagccagtggcctcgggagtggggctgcttgagactgtgggaacgatgttttcgttaagaatggactgcctgtataatggtggtcccataagattataatactgtgtttttactacaccttttctatgtttaggtatgttgtttagatttagaatatgtaacgcaattaccgctgcgttaccagcaatcccaagaggaccccagaccctctgaaggaagcgggctcctgcaggacccgggagacagtgttgaacttgaccttgctctcctcctcgggtcaggcctgccgaccctgcactacaggttcctttttctctccctgtccgtgcatccatctgtttctgcactctcttcggtgcatcctctgaaccaccagaattaggttcctccacaccaaatgtgatcatttcatttcgcagctagattgctcgtgaacagctaagcaggtcacgctgagctcgacacagtccaatcccaagtaccagtcaggctcccaccgtcccttcctatcccaaaatgtcacctcccctgtgttgcagccacactgaagcctcaatgtcccctaaacattccagaccctcttgtgactctgagtctctgcccctgggttcacgccacttagaatgagcttccccccattttctgcgatacacactgtcactttccctgggaacagattcgacctgggcagaatgctcttcagtttgttcctatctctgccgggatctatatgttctggactctcttctacgacacggagacctttcccggagcaggaacggggccacggccgtgtttgcattttctgaacccaggatggtgccactgtggtttgttctccccgttcaagtgttgctgactggtggggagggacagcatcgcctcagtgaaagttttgggttaaacactgtctgcagtaattcaaaaggataagaaggactcctttcactgtgcatctttagacgaagcatcaacaaaggctttttcactgaaatccaaactcaaggtgtatacatgtcacctcccagcacagcaaatggcacagactcgagggaatgttttccttccggaacaacattataaagcagcagcccccagcctgtaggcaccagggactggtttcacggaagacagttttcccacggaccaagggtggtggtgggggatgatgatttcaggaagattccagtgcattccatttatcattagattctctcaaggagcgtgcaacctagacccccacatgcacagctcacaatagggtttgtgcttccatgagaatctaatgctgctgctgatctgacgggaggcagagttcaagtggtaacgcttaccttctgctgtgtggcctgcttcttaacaggacaccgactagcactggtccgtggcctgggggttagggagccctgctctgttacagagaacaaaatttgttacgtagggatcacttgagcccaggagttcaaggctgcaatgagctatgattgtgccactgcttttcagcctggctgagcgagaccctctctataaaaaatttttttaaagagtaaaatttgtatagtttttgggaatttactatggtgatattttatagcgctgtcaggaatgctctagctattggtgggccctcagagcacagtgaattcgagggctctgatgtattctgttgttttttttgggtttttttgttttttttattttgagacagagtctcactctgttgcccaggctggagtgcagtggcaccatctcagctcactgcaacctccacctcccgggttcaagcaattctcctgcctcagcctcctgagtagctgggactacaggcgtgcaccaccacgcccagctaatttttcctatttttagtagagacggggtctcactacgttggccaggctgctctcaaacttctggcctcaagcaagttgccctcccgggcctcccaaagtgctgggattacaggcatgagccactgcgccgagcctctgatgcgttcttgccggtcatttgtacagtgttgcttgcatgtgagttcttcttcaggtcgagattaagggtatgacattagtactaaccattattcaacctctgaaatatacgcacatgggacaaaggagataatttcatttacttatgtggccttactttgaagatattcatatgttagtccattttgcattactataaaaaatacctaaggctgggtaatttataaagaggtttaattggctcatggttctgcagctgtacaggaagcatggtgctagcatctccttggcttctagtgaggcctcaggaagcttccgatcatggcagaaggtgcaaagggagcaggcatgtcacatggcaagagtgggagcaatagagagaagggggaggccccagactctttaaaacaaccatttctcacatgaactaactgagcgagagctcactgatcaccaaaggatggtgctaagccattcataagggatctgcggccatgatccagtcacctcccagcaggccccacctccagcactggggattacatttcaacatgagatttggaggggcaaacctctgagccatatcaccatagttagtgcatgccagatgatttttgcgtttcccacaggatgtcagtgagcctttttctcagtcatggccagccccaacagagaggcaagatgagttcctcttggttgtgatgcctcttttcttttcagttcacactttatgccctttggcttgctgccaggtgctacctttcacccaaaagaaccacaggctcctcacggattttgcattccttcagggtcctgccagttactggcaaattcaatgataattgtgctcactgtataaaatactttctggaataaggtaaaatatgaatgaaaaaatgcacaaatgccaaacaaatacagttgcttgtgctgagattttgttttaaagaagaaagagaaaaacaaagaaattaaggacagcattgcgatcacttttcttcctccaaacaaaagctttcaagcgcaacatgttgatttttaaaattcctttctgggctgggcgtggtggctcacacttgtaatcccagcactttgggaggccaaggcaggcggatcagaagatcaggagttcgagaccagcctggccaacatggtgaaaccccatctctactaaaatacaaaaattatccaggcatggtggtgtgtgcctctaatcccagctactcaggaggctgagagagaagaatcacttgaatccgggagatggaggttgcagaaagccgagattgcaccactgcactccagcctgggtgacagagtgagactccaactaaaataaattaataaatacatgaataaataaaaaaataaaattcctttctgtagccactgtgagccaaaagcacgggcttaaactgcagagtgctgtgtgtgcactcacaaatcccaggttcccagagtggagagccctgcaccccagccgcggccaagggtcagaagtagcaactggtgattaatcaagtggctcctgtcttaggacagtcagcgtttattgtctctgcaggccagactatagaaataagcagacccacaaaagccagcaattaatatttccccggagagattccagatgctgccgggtggactgtgacatgctagcattcttcctgctcctgatttattccattgtgtggaagagcttccacagaaatgactctttggatttttcaggaaatgtttcaagccttcttattcagacaccctttcagcgtccagtgatggacgaagctgtgccctagagtcccaccttcccaaacagtgggcaacttgctttctccagcctcctgtccccttccgagcacccttcacccctcccatccccaggagtcgctgaataggtcccatgggagagaaatgacagcttgaagtgatgacccatcccaccccatcaaatgttggcattttactctggcctccaaaggcatggggggatgacccatggcaggaatacaggccttacagagaggttcactccaaccaaaccatgctgctcccccagtggcccaccatgaaaacctctggaaaaccaacttatttgccaaatgactcccatgagcaggcctttgcaaaatttcagagtgttgtacagctgcatcccaggacaaaactctttcttttcagtactaacagtgcaagtagaatagggtcgtggtggagcatcccattgtcttcattcctggtccactaattttcatctgagttaagagttttgggtttgaattcaagggaaatgaaaagttcttaaaggggccgggcacggtggctcacacctgtaatcccagcactttggaaggtggaggcaggcagatcacctgcggtctggagttcaggaccagcctggccagcatggcaaaaccccgtctctactaaaaattaaaaaaaatagccggggttaatcccagctactcaggaggctgaggcaggagaattgcttgaacttgggaggttcagtggaggttgcagtgaggttgcagtgagccgagatcatgtccctgcactccagcctgggcaacagagtgaaactccatctcaaaaaaaaaaaaaaaaaaaaaaaaaaaaaagaagctctcaaagggcctgagccaggcaccgtggctcatacatgtaatcccaacactttgggaagccaaggcagcaggatcacttgagctcaggagttcagcctgggcaacagagtgagactctatctccacaaaaaatgttttttaaaaattagccaggtgtggtggtgcatgcctgtagtcctggtgggtggccaagtcaggaggatcgcttgagcgtaggaggttgaggctgcagtgagctatgatcatatccctgcccttcagcctgggcaacagagtgagaccttgtctcaaaaaggaaaaagaaaatggcttgaaaggcatgtgagacattacatagtttgaggtatttcctttgctatatgcaaaggcataaaaatgaacagggagctagcggtttattgctggtccgaaccagcaacatcacagctggccctgggcgtcacagggtctcatgggggtaccttaagaggattcttaaatgaaactcagaacacagagaagtagttgattttgtgtcttgcatgttctgactcttcatttagtgtcacagcaagggtcaaggatatgggaaatcataaacaatcccaagagtttcatgatctttgagaatcttaaagcttcatctaagctatgcttttgaattgggcagaaccagaatggatacaagatgaatacagttcaaatgattctaaaactagagattaaatcctgtgaatttcctactctcagcaggaggagattacaactatttccaggtttaagatgatgaacatgattggttttgccccgtgctcactgggctcagatgagaaatagctttaaggtgcatccagggtttggttggttgtgaagaagaatattccttgtcgtcaatgaataaatgttgtgataggtcattagaggaggatctagagccctttgctggaaattgtttgaatttgaagccagagaagtaagcaagtaaccactttgttctccttctttctctttgtttactccattgtacattgactgtctcccaaagtatcccaccgagccttaagaaaaagttccccttaaagataacagaactggaggattcagctaggggctttttgattagtcaagaagcctttgattggatggacatgtaatcccagcactttgggaggctgagacgggaggattatttgagtttaggagttcaagacaagcctgggcaacatggcagaaacttgtctctacaaaaagtacaaaaaaattagccgggcatcgtggcaggcacctgtaatcccagctactcgggaggctgaggcagaattgcttgaacctgggaggcagaggttgcagtgagccaagatcctgtcactgcactccagcctgggcgacacagcgagactccatctcaaagaaacaaataaacaaacaaacaaaaaacaaaaattagctggatgtggtggtgcatgcctgtagttccagctactcgggaggctgaggtgggaagatcacttgagtccaggaggtggaggtttcagtgagccatgattgcaccactgcactacagcctgggtgacagagtgagaccctgtctcaaacaaaacaaacaaacaaacaccttgattgatgatccaatatagttcttttgttgttctttgggccttcttttttttttttttttaatgatcacttatctttcccttgagggaaacctacgttgtaaatagagaattttttttttttttttttttttttttgagacggagtcttgctctgtcgcccaggctggagtgcagtggcatgatctcagctcactgcaagctccgcctcctgggttcacgccattctcctgcctcagcctccggagtagctgggactacaggcgcccgccaccacacccggctaatttttttgtatttttagtagagacggggtttcatcgtgttagccaggatggtcttgatctcctgacctcgtgatccacccgtcttggcctcccaaagtgctgggattacaggcgtgagccaccatgcctggcctgagaaaaatatttttgatttccactttatagatgagagaattgaaattcaggttaatgatgccactcaggcttgaaacttcagcatcatttttgtgtttcttctgcacatcccacattcggtccatcaccaaattctgttaattttttcctcgtgatgttactggcatctgtctttttctcatcacatccactgataccaactggggctttctggatgattatactggatttttccattaccttccacatgctggtcttacctccttgatgcctcccgtaagtattttggatcttgggaatatgaattcatgtctgttcccttcgtttggcacccccatgggttgtgggcacagaggcagggaggctctgagaggcatgggccaggaaaggcttttcagagatttctgagcatacctgtgtcccttacaccttattctaattcacaccagctcttggtgtttgctcttcgactgtggacctctgtggatggtagacaatttgtgtgagtccacgagcccttcagtgttaaacatcattaaacataaggtcgcaaaagtcagctgatgctcaaactgaaattgttgtattttgttttgttttatgttattttgtttcccagaatgaggatatattggtcttattgtgctatgtgttagagccacatattctttcttctgattctgtgttcacattgccttccagatatcatcaaatctaacatgttaaaatctaacataatgagtgaaaatatatcagcgagaatgataatagtatctgctttctaatccatgtgttcatcatgggaaataacaaagctgcatcatatcctgtcttgtttctatcatgtcctcttctccagttagatcctaagtccctccatgacaaagacctggattcgttcacacatttagtgattcagcaaaacacctagtaagtaccccttgtgtggaaagccctgtacttgcctttggtcctatgggagttgcgttgcttgatgttagtgatgtacctaagggtggtgttaggactgaccggggctcccctcccaagccccacctatgtttttaatcacaataccatgcaacttccaaatcaacgctgttgatagaaagacacctacccagctctgaagagttatttggtccctagatcaaggggcagataagtcagatttccagaaagatagagcctgcctctttgtcattccatctccactattccttcactgatgagaaagtgatcagatcagaactgatgttgtataaactgctctgtaattcctgcctgattggcttttcttgagaggtgcctgtccattagcttttgccttccttttgtcaggctctctaaacactttaagtaacagaatcaattaagccttcctcacgattttagaaaactaagtggtagctcaggaggggagtcatcctaacaagctgtctgtgtagacagtggattctgtattgtcgcttttgtttctcaaaggtttgggtttggtcagaggttaccaaggaaccttcgctatatttccacagattcttttgtgagcctctagttcacgccctgtaaggacattcatccttctctgtccttgggagacgtaggaaaattatttcctggagaaatcaggcgcttgtaagagccagcctttcaaagaggtatctaccatcaaaggggctaatcgtccgagtgacagacacgcatggctggcttccctctttactctgccttgattgagacaagatgagcgtgctgctggccttagcaatgggggattctgttagaacaatatcctcagggaatagcttttatctgctaagtatgacaagtgtggcaactgtgcacagagtccagatctcacgacctcgctttgcaaaggctacaagaccaagggcttgtgtacctgccccaacagagacaggctgactcttactacgtggccgtaggaatggtttgcccttgctcaggacttatttacctaatgtcgtttggcctggaatgtttcagagcaccctttcatgcctggtcagggttgtgatcccttttggagacagaaggaggtagacgtgcttttgtgtttccgacactgaggacattgaggttctgggggattcatcacttagctcccaactcttattgggagcagaagtgccactggagtagggtggctggtttgagggtgtggccccgggaaaggtggcaggacacacttctcttgttctccagcccattttcaggcacggtatcctgcgctgctagcaccgtagccatcactgacctcaggaccctcccggtgaacactcagttaaaattcctactcgctgcagtgggaaattttatgttatgtgaattttatctcatgattaaaattaaaaatgaaattttaaaaatgaaatattcagttgcctttcctagaaggaatcatcccgatgatactattccttacttctcacattcatcccattctaatgcccacatttacttcataatgtattacctacgtatagtgtatgttgttcgcttcatttagcatgaccctatgaaatgcctgtgtgaccaaaagcagatcaactgataaggccttttgtggctcagatgtgtctttgcggggaaatggtcaggcgtcctctgttggcaagggcacctgtcccaagcagaaatggagaaacacgtcctcacctcctcctgccacctgctctgaacagattctgtagcgtaaaattctttataaatacacatatcaatggagttcttgacattttgcccagaacctgaggaagaataaaacctttcttgtccaactaaaacacacacggaataacaagcaaaagcaaaagagaaatcccaagaaaacagaccagaaacaaagggttatgctccgtcattgtccccaagagggttacacatgagactcacagggcaaattttatctaaattaaaatgctgatttttcacattacaggcccaaagtttaccgaggtcacagtgcttttaaaattaatgaggccgggagcagcggctcacgcctgtaatcccagcacttttggaggccaacgcgggtggatcacgaggtcaggagtttgagaccagcttgcccaacatgacgaaaccccgtctctactaaaaatacaaaaaattagccgggcgtggtggtgggtgcctatagtcccagctactcaggaggctgaggcagaagaatcgcttgaacccaggaggtggaggttgcagtgacccaagatcgagccactgcaatccagcctgggtgacagagctagactttgtctcacaaaaaaattaaaaaagaataataataatgagtgaagattagcttcctctgaagtcagttccttgtggatcatcttattgcttattttttaacttatttgatatctcactgacccctcccgaggcagaaatttgcttttgctcattgcaaactggccaaggaaaaaaaaagaacaatttcctctatagagtagttcccccttatcctcagatagccttccaagactcccagtgaatgcctgagacctcagaaagtaccgagccctgtatgtgctgtttttctgatctggtaaccagggcggctactgagtggttaacaggcaggcagtgtagacagcaggaggtgctgggcaaaaggaagactcacatcccaggcaggacgaaatgagatggggtgaaatttcatcacactactcagaatggtgtgcagtttacaacttatgaattatttatttctggaattttccacttaatattttcagactaaggttgactgtgggtaactcaaaccttggaaaacaaaaccgtgggtaagggaagactgctttaagatctgagaatgaggactgacatgttttggtttggctggtggtttcagatccaacctcagtagttcctagagaccatttaatttgtttttgagatggagtctcgctctgttgtccaggctggagtgagtggcgtgatctcggctcactgcaaactccacctcccgggttcaagcgattcttgagcctcagcctcccgagtagctgggattacaggcatgtgccaccatgccaggctaatttttgtatttttggtagagatggggtttcaccttgttggccagactggtctcgaactcctgacctcaggtggtctgcccgcctcgacctcccaaagtgctgggattacaggtgtgagccaccatgcctgaccgagaccatttaatttgaataagtgcccaagaagcaaaggactgagccaggcaagatgatctgagagcaggaaggtgtggccaggctggctgagccatgaacaggctggttgctccagggccggtgtctcccctggaaggttctggagttcaggctgtgttggagtccaccttctgcccctcaagtccatggcagggccgttgactgctgctcttgcctgagtctcctggttgcaaaggccaggcaaggcactgcctaacgttgtgactaacatcgtgggtgtgacggggagtcagggtggcttctctgttgccccaagtatgccctgcacatcaccatcttccttttcaaagaatggtgaaaataggaattgtgctctttagggaagattgtcttttttatatctttttcttttttttttctttttttttttttttttgagacagagtcttgctctgttgcccaggctggagcgccagtggcgcgatctcggctcactgcaagctccacctcccgggttcacgccattctcctgcctcagcctcccgagtagctgggactacaggcgcccgccaccacacccggctaatttttttgtatttttagtagagacggggtttcaccatgttagccaagatggtctccatctcctgaccttgtgatccacccgcctcggcctcccaaagtactgggattacaggctcaagccaccgcgcctggccttttatatctttttcaaagaaaaaggtaggctgggggcggtggctcacgcctgtaatcccagcactttgggaggcagaggcgagtggatcacctgatgtcaggagttcgagaccagcctggtcaacatggtgaaacctcatctctactaaaaatacaaaaattagccaggcatagtggtgcacacctgtagtctcagctactcgggaggctgaggcaggagaattgtttgaacccgggaggcagaggttgcagtaagctgagatcgtgccactatactccagcctgggcaacagtgtgggactccatctcaaaaaaaaaatgtagaaaaataaaaacaatcatctattcatggctaggtagaggtcagatttcactcactgacctgtttttagattttccttcgatattccaactcttagatatgtcaggttgctggagttgctgactgcactaacttctgcattctccaactttcccctcagagagtggcttgtctaaatcacccaaattaccatgtgggtgagaatgttggggaaatgaagatttaaaatccacaatattattagtgctgtcaatatcataatatcataaatgtccatacgaggaaaggagaccttggcagaggctaccttttctatctgttttgtgtgtgtgtgtgacattcttcatgaatgacttcttgaactatgaaaatgaggcaactgtggcctgaactctctcatttgcctcctccccttcctggcatttacttaagacatttcctgatgcttcccgggggtgtttcatgctggtgtctaagccagagatcacacctcccacccaccatgcctgcacctccactcctgcaaaggtttttagagtcagggtccctatcagtgtctaagcatcaggctcttcagaccctgacctttgaaaagtccaaatggctcttgagtgccccattttctcccaatctgaaaactgtaagaatgaaatataacaattaagcctcagaggatcacaagcgcaggtgatcctcatgagcccagactgatatttctaaattatctagatcttccttgaacatagactccagagttaccgggacgcagcgttcccattccactgggcagccatctatacgtgaagtgtcattgttggtggtttgggagttttattttccctttcataacacgtctcctgtctcctcagctcccccagaactccctgtaatcatatttgctatcagttgtgtttgtggaggtgtagtgaatttttcagggatgaataccaatgctgagaccctccaagaagacctgtgaggtcagcctctgtcagcgtgacagcccagtgggagggggccccaagctacacagcaggagatgattgtcacacgtcctggtgagagagcctgctcaccagctctggacctgcactccgtgtgcctggccagtagataggtttccctggtgttccccaggccttttctgcttcatgacattgattatatagctagcatttcatttcagtagggcttgggaaagggggttctttattgcagctcctgtaaaaacccatttccacacgaatcacctctggcctttttctgtctggcacattgtttagacaggaggggtttgtgtgtatcacttccctccagcctctcctaagtggaagcctgggatttggaaattgggatttttttccttctctctaaatgaatgccttgttggataccttgttgataaaatgccatttctcacatctttatagcttaaggggctaccttagccacaaggcacagtcccttattactgataagagctactgtcatttcacttatatactttgggagattcatttttgcttctcagcatcatttatgttatgattcatatctaaatttaaggtaaaattttatgcttcaccatcgacttttcaaagtttgtctttgaaaatgatttttaaaatgatctaatccaaacctctcagtttacaggtgagaaaacaaatctagggcagagtttttccacaggggcacgagtgatgtcatggaccagatgtttgtgtcgtagggggatgcctggtgcactgtagggcatttcctgggatctcaagcttctatcctctggatgccagtagcaccctccaagttgtgaccaacaaaaatgtcccctgtcacacagctaagtcataacagagtcaggcataagacacgggtgtcccgactcccccatctgccctttccaggttgggcaacagaattaagctctcaacccacacagagctcagagaattagtcaagagcacttccacaatctccagggagagaagagggtttaggagacaaaagagccaacagcatggaagagctttgtggaactctgggcgatgcatcccctacatggaagagctttgttgaactccaggcgatgcttcccctatacggaagagctttgtggaactcggcagtgcatcccctacacggaagagctttgtggaactccaggcgatgcatctcctcaccggaagagctttgtggaactccgggcgatgcatctcctcaccggaagagctttgtggaactccgggcgatgcatctcctcaccggaagagctttgtggagctccgggcgatgcatcccctcaccggaagagctttgtggaactccgggcgatgcatctcctcaccggaagagctttgtggaactccgggcgatgcatcccctcaccggaagagctttgtggaactccgggcgatgcttcccctacaaggaagagctttctggaactcggcaatgcatcccctcaccggaagagccttgtggcactcctggcagtgcatcccctacacggaagagctttgtggaactctgggcaatgcatcccctaaccggaagagctttgtggaactgcggcaatgagtccactctccccagtctccctgtctacgaatagaacttggcccagtgagtcactgactcaacttctgtgatcttctactagacgatatggtttagaaattcataagatgtgtgtcaggagttaacaggtttaggggaaagaacagaagaggcggaggaatgtctccccatgaatgctgaccctccacatacccagaacctgggactagccccttggcaaagactccatgagcctcatacagtgaatgggactcgttctcagccaggtagacatcagcttgggtctgacccccatccttgtgtgcaagtcctgattcacagagtttctttggcacttttgcttaagctgtaacaaacagccagtctgcacagggctcccttctgtctttccctttaagtcggctcacatttctctcctggtcacagctgtagaggacacacacagcacgaaacatgaggagtgtggcaagtaatgaatgcccccagggtattgccactttctgacagatgaggacaaatgtaatttccagggatttcatagctgagagattagaagctttcctgctgggcctaattctggagccaggtatgaacctgtgtttcccttgtataaaggtaaaagaattctgttactggggctgtggatggagccgattttaacatttgttttttgagctccatctatagctcgtaaggtccaccaggctggtccaaggtgcctttcctctagacacaggatttcatttagtggctgtgcctacatgcaaagcagcaacttcattcaactctctgggtctttgtcttagtgatgccagaaataacaaaatagaaactgaactattacatgaaatgacttttgggttggaaaaacaggctctaagaacagagttaatgaactgagagaaaatagtttctggttatgctactagaaactgtggtttttatcctcataaatcattgctttagggaaaaaaagtcctttctaaacttttcctgtcctgtttccttttcattttttgaatgaatgaacagtagggtattctctgtctttgagttattttcttcctagccacctggtcataatccagagggaaaaacaaattagatggattctgtgagctatatttcattgctattggtgtgtggatcacaatgctttattttccaccagttaaacgaagaacattctggaaactttgcacaaagaaaaattagtgtttatccctacagttgaaattttctaggaaaaaaaaatagcaacaaattaagttttgaaaaaggagagccaggtgcagtagggtgcatctgtagtcccagctactcaggaggctgaggcgggaggaccactgcagcccaggagttcaaggctgcagtgagctatgattgtaccactgcactccagcctgagcgacagagctagactctgtctctaaaaaaagaaaatttaaaaaggaggcttggctgggtgcagtggctcaacgcctgtaatcccagcactttgggaggctgaggcgggtggatcacctgaggtcgggagttccagaccagcctaaccaacatggagaaaccccatctctactaaaaatacaaaaaacaaacaaacaaacaaacaaacaaacaaacaaaccaaattagcccggtgtggtggcacatgcctgtaatcccagctgcttgggaggctgaggcaggagaatcacttgaacctggaaggtggaggttgcggtgagccgagattgcgccattgcactccagcctgggcaacaagagtgaaacttcatctcaaagaaaaaaaaaaaaaaagagctttgattttcatgaataccagtctatttctgaaggtttcccccttggaggaacagtggtggcgggctggccctctcagtcaaggagacgtgagcattccatgagacacgggtttcctctagggtctgcccctgaggtacctgaggtttggatacctctgcccactcccctctgccatgtttttccagctgtaccgtgccgataatcactgtgtcagctgtcattaccataatgctctgagcataactgctgtaacagctgggaaagaactctgcctttgcaaaacaatgctgcgtcataacacgctaaaacccccaatgtgcccacccaatatttcctatccatttgccccttctgcactccacaggcatgatcttccctttgccagtgggacatcagaatgagactctcttctgtcctccctctccttccccaagaacagtccttgcttgcaaatgcaaacagagaaaaagatactacccgagtgagcaggtgtttccgttggggtctgacaggagaaagacaccacacttagatcgggactatttagaaaagtatggatggagtgtagaaaatgaaaagggctaattagatagaccagggctagtcatagcagagtgccaggatggcctaggtccgaagggtcaaaaggagggaaccatgttggggggacagaggaaaggaaggtgtggcggagcctccggactcgcctcctccctccagagggcaagggggttctgctgatgcagtccaggcaggcccactccctggacaccaggagagtggaaaagggtggagactgagtctggagggcacggaggaaaattggctcagcatggattagaacagtctttcgcttcctggagcttaaaagccctccttacttacccttagctcctgccacctctctttgtccttggatggatacagcgcatgcctcctgcctgccacctcatctgtggtttctcatcctgtttgctgtcctccttcctcgttctgcccatgctgtcataatggatggaaaagctaaaggtgatttccagtcatctcttttgctgctgacagcatgaagtttgttctgctattagaatgacgcagacccgagacaagggttttgtcctgagttcattccattaatttctctctgcatagagcatctttccagcagctcctgcatgattaaattctggctgtgtgggacacaatggcacaggaagagcgttggccactcatcagccaggtcactaaaaggcaagttccacacatgaggagaaatcaaatgctcaccctttggacatccatccttttggtcctttgagtaacatttaaacaattgtttcttcagatacatggtccacactcaagagacctacaacagttggtatcacctggataagtattcaccaggctctctatgcccagttttttcccaagttccaaccaagagctattgatggctttgctcttgatcagaatagcattgggttttgctgcaaatatattcttgagcattatagtgatgaagaaagaaagaaagatagatagatagataatagagaaatagaagataggtagatagatagagaaagaagcttgcgtgtgtttgtttcaaagaatggggtcagttttcttacagccacctattctctcgcctggacatatattcagtgaatgcttctgtttgtaagatggctaactgggatatgggtcttacaggtcttcagttcctataagagtctacaaccacagcctcattaacacatgctctctggtgaaaagacattaaatggggagggaggaggtgtggatgctacgctggcttcaccacatgtaattattgaactttgtatatcactttacctttctgggtctcagggaccttgtctagaaacccaacaaggcaggctgtggtagctcatgcctgtaatcccagcactttgggaggctgaggtgggaggatttcttgagcccagaaggccgaggccacagtgagctgagattgggccactgcactccagcttctgcaacagagagagaccctgtcaaagagagaaagaggaaggaaggaaggaaggaaggaaggaaggaaggaaataaataagcaataagcatgaagtggcagttattctccaagtgaacagtgtggagtaactgccattttactggtactcaagtacttggtgtaactgctacatccaggcaactgctgagacttgagcaaggacctttacagcctttggaagtcccatccgtcagacacaccagggagcccgatgctgaacttcatgtctgtgtttgctgaatgatgagcaggtcctcttcagcgagagctacacgagctgtgaatttaccacgtgcccgtcaagggggtcattgtgttcctcactctgtcaataaaccacacagtaaagatctggataataggagcagaacagtttcaaaggacttgttacaatgtatcaagtcaataacttataattttagaaaatccctgaatacaaatttgcacaattttgagttgttttacaacttaccaggccgttaatctaagttttaaaagtctcttaatatacttaatcatagcctgtgcttttttttttaagtgctgaaatatgtttcagcattactgaaccacagcagcacaaggaaaaaacgactttaactcgttccataaaacttgcaaagcaaccataaatatatacagtgtggggtctgttttgtgcacaatttatatgcaataggctgggcttgatcgagaggatttatgcttatcgtctgtctccccaggcagacaattgtggtagaaaagaaaatgcacaggacctagagtcagggctgggtttcaatcccatttctgccacctgctttttgtgagaccctagggaagccttttgctcctttgaacctgtctcctacttaacaataatatgcccaccttagagggcagctgtcaggattgccacagagcaaggcagaggtgagccatctgcagatgcgtgctgaatttaaaccaatgcatgagtgacacggagcatgagagtggccagcatccttcctctctccctgcaccccgcaaaacaactccatcccccactctctctcagaggtggcagcggccataattcagacacatgcaacccagccagcgtaaccaccccctactcaccccctgaaaatagaagaagaaaggatttagagtctgggcagattgcttttaaaacatttccaaccttcgatctaatttgtcattattatttgtagagctttctttctcttccttcgtatctcctttcatatccggagcattcccagggaagatcccgttgctgaatactcgtgtctccagttttctacccggacttaaagatctactggtcctgcagagctgagctccagtggtgtgaaaggcacgtgagcgatgctgggcttgtggagatgagtaacacacaggcttgctttcaaggcactcacagccttacacatttgaaaatgagtttttcactggagcctgaaacttccagatttgaaaccatctccggggccaagcctggctgagactctctctctctgcatgagctgcctgccaccatcagttccccacccagatacccaagcctgaccttgacctgctgggggaaattcattatattctcgtttactccattttatagacgaatgtttcttatcatgaatgagagttcgttaaatcagctggttctaggtggagttcactagagccctctccaatgctgccggaggacctgttgccgtctgggctgtattgtaggtgggtggtatcataataagatccgtggtacacgaatgggcttcagggcaggcctgggttacatcaccacctcactttcggtgtgtcaaagctggaaaaaacagctggaaggtggccagtgttcgcttacccaacgaagcatgactttgcatctcctctaccctgcccagtgagggctccctgttttgaaggactggcatattctggaatgcttccaccaaatccaaacatcattctggatgaactgtggagcagttcaccgttcacagttcacaaaaggaccctctgtagaagcagaggatctttccctggggaaattatcctaagtcttctgattttaataactgatatagttcaagtatttgtccccgcccaaatctcatgttcactgttaatccccagtgctggaggtggggcctggcgggaggtgactgcatcatggatccctcgtgactcggtgccatcctcatgatagtgagttctcccaagatccggtcatttaaaagtgtgtgtttcctgccccgtctcatgctcccattctcatcacgtgatgtgcctgctcccacttcaccttccaacttgagtcagagctccctgaggcttccctagaggctgagcagatgccagtgtcatgcatacacagcctgcagaaccatgagccaattaaacctcttttctttataaatacccagacttgggtatttctttatagcaatgcaagaacggcctaatacaataattgttttccacatgaaataaacattgaccgtcttatccaactatacatgcttcttgactctagaaattgttgaatggaagtgctaaagattatcctcaaacacactcatgtgcacacagtttcagtgccagaacagtgtcctctaggaggaaagatggtcccagagcaattactggtttcctttaattttggcttcctaatgagtatcattttggtacgattccaatgaattgtttatttgaggaaagagaaaaagaaaagaacctataggaagagttggtttggattctatcgcgggcagtttatgcttctacgatagtaataaaagcaatgagagaaaaaagctacagaaccaaataaatatagatccaggagttgtacaacttttaaaagaaaaattctttagcctattgatccttcctaaggtaaacatttattttatttcagtttagaactcaagaatttttttcaagtacaactgaggaatagagtcagaagccacttcgattttgacaccatagaaacattctttctttagttactagaatcttttaaattgataagattggcattttcccaggatataacattcacctccactgtgtttttaatttgcaatagattttgagggaaagattccacaaggatttggccaacatgcctcctgagcagtgggtctcaagtgtggtccccagaccagcatgatccccatcagctggaaactgttagaaatgcaaattgtcaggccctaccccagacccactgaatcagaaactctgggaggggaaaccaacaatctgtgtttcaacatgaagtctgagaacttaaactatgcaccgttcttggtaagaaaataagagttttcctttgtgtgcgtatgtgaaaccaattccctgcaacccacagttgtttaaacaaaaacgtgtctagggagttcaaattaggtggccaattgccttataaaagtttacaaagtaaagagtctgtgctgtttccgttaggagacagaaacccaatcactaacttggagtatgagtcagaggcaggacagagaaatgtctgtctagtcggtgagctaattaatacgtgatcctgaggatggaggagccagggctgccgttccttctccactagggaaaaaaaaaaaagatgtttctctgtcaggcagctccctagctacctccagtatgttctattccatggctagaggagtgcagcctacatcctgtggatttatgtatattactgtaaaacaagctttctcttctcgagagttccgaagcagatctgtctctgattctttccatgaattcaaatacattgtcatccttaggtttcctaggtaaaggagactgcattactcatcagcatttaataaatattcatttgttggttgactgattcattatccttcatgccaatcacatggctgctactagcatgcatacagccgactcttaactacagttgtgtcatctacacaatccctgcagaaaactcattgaacacgtagtcgacacatttaaaaatgctgtgctgtggaagtgcaagttgcacaaacattttcatctttagcttcacttagaatacatttttttagttttttaatgtttttagagacagggtctgcctctgtgacccaggctggaatgcagtgctgtgtgatcatagctcactataacctcaaacttctaggttcaagtgctcctcctgcctcagcctcccaagtagctggcactataggcacacaccaccatgaccagtgtgtgtgtgtgtgtgtgtgtgtgtgtgtgtgtgtgtgtttgttttaatagagacggggtcttgctatgttgctgatttcaaactcctggcctaaagcaattatcctaccctggcctcccaaagtgctgggattgcaggcatgagccacctggcccatctataactaacttcataacactccaaattggaagaaagttggtggtgttattagcattattttacagatggagaaattaacacctggagttttgtgattacagagcagtggtaatcacccagttattttccttctctgtccctccagtggccctctgttgtctgggttaagtacagactttttagtttgaggaaaggagtccctccacaatttgtcattcctctattcttccagccaaatttcttacttctcctccaccctcaactacagtcaaacatcaaacaggccgggcgcggtggctcacgcctgtaatcccagcactttgggaggccgaggcgggtggatcatgaggtcaggagatcgagaccatcctggctaacaaggtgaaaccccgtctctactaaaaaaaatacaaaaaattagccgggcgcggtggcgggcgcctgtagtcccagctactcgggaggctgaggcaggagaatggcgtgaacccgggaagcggagcttgcagtgagccgagattgcgccactgcagtccgcagtccggcctgggtgacagagcgagactccgtctcaaaaaaaaaaaaaaaaacatcaaacaatactcactgagcccttcccacgtgccgggctatttgccgagaacttctcatgcattatctcatttaatcctcatcacaacttctctcaggtggaggcatgattgccatcccatcatacgggtgaggaaactgaggctcatagaagtaccttgccccaagccccatggctacttgcaggttccaagacaccggtcagcctgcccccctgcaccttggccatgctgcccactcacctagagcgcacagctgacactgagtcctcttctgaacctcatccatgaacatatttatgaaatctttcctggccccaagtggaaatgccccctcatttgggtcctcactgaaccccagtacacaactcttttgtactactctattatgctggggtgtttttttattgtctcacctgataaaccgtaagccccttgaagacagcaactcgtttttaagctctttataaccccagagcctcgcacagtacctggaccagattaaggggtacttaacagatgcttagtgaaggaaggaatggatttctcacctggttgcttatcttctagactcatttggggagtggccaggagtccgggagagctgccggccattgttccgtcccgtctgtatcccttgggctagtttcttctagactgaggtttctaagtccaaacaagatgaactgtgcacagtgcctcaattagggaacagcagcttgagtgctttggaaatacaaaagtgtagtttgtaggttcaccttgaaggcaagatcagacagctctacgtaagccagagctctgaaacaaagcttcaggctgggaccactttgcagtctcagtgcctggtagtggggactgttctacagagccgtgatcaaacctccaactgcattctggtcttggaggaaagctgattccgtatgaagagaaaaggcctggtgagagtatttgcagggctgaagaaaagttaacatctatagtttggcaagcagcagctgcaaagcatccgtcccagcacatgataaatgcttctgacgtttccttcagacacagtgtgctaggaaggcttttaagttctcaaatgcaggagtctgccttattgatcaggtgcctttcattaaaggtttccaagcccctcggctacagaggaaacgctcccctcagcctcctccacagccccagcctttcatgcagaggggattatcattgttggaatacggcatatactttaatttggtgaggctttttgtttaatgcttatgatatgcacactggaacagactgggattaggtaattttcacattgagttggtacttccctccctaacccccatctgatcttccatatacacattttaagaagaaaataaagagaagacacgtcctcctaatgatcctccgtattagaacttaccattctgctttgaactcctgctgctttgagtctcccactgccagcaagcacttctctgccaggcggaggggcggtgaagggaattaaaggggcagtcagtggcttgcctctggcgggaggtggcggagcgtctcattagcgtttgctcctttcctccagctgggcttcactgggcccctcttcttatcaacccgtccttcacttcacccaggctgtcccctgcactcagaccccctccagtccttccaacaagatggcagcaggatgactgggactcattggagctaagcagagaattaaagttgcttttgttccaaacctaaaacttgaaaatgaaggaactcttacgtggaaatgccaccatctcccttttgttttatgcgtaaacccaactggttccccatcctctgggtctccttcctgcccctcgctggctcagggcattgtacatactgtgtgttcaacacatgctgagtggaattgaacagatgcagtcctgggaaagggggccttttggaagaactgatggggaaagaattggggtaactgtgggcagttactggacgttcttgctcttacttattggttgaatgagaatgaaagtatctaagatgtaccaagtcccagggatagtggcataatttctctgttcctccttctgactccctcttctcccctcttttagtgtggggaagttacgagaacgtagcgtttggtgcagtgatccattcagtatacgtcgggctcttaagaaagttaaatttacctaacatcctacattttagataagaccgttccagatttccacctcttgacccaaaagatcccttcggtggttttccttactagggcaattcccttagtttcttggattcttccttcctctccttcctggaactaagctgcagagtcccaggctggagaaatagcccactgcccaggggtattttagaaagggcttcccaccttccgcagtgggcctggagaaggacgccttcttttcaccaccaggctgtgatctcgcaggctggcaaggcctttatgatgaactgaatgcggtctgtatttacgtgcctgccatctgtccccaggcggcactgagaagggggctgatgctgtcacccctagctccttctgcaggtctcctccgtacgtgccactgccaggaacaaaattatcatctcatgggagctgcacacatttaatggaacttgggagccagcacagaccgttttcctcaaagacagttttataaagaaaatggactttggggaacaacgccagaaagacatccagtatacctaattattaggcgagtgtggtcattgcctctttgtcttagataactaggttgttgattacggtgctttgccaaactccacggtggatctggtagctggtatttctgggcagacaccagactgagttacttcttttcagagttctggacgttactgatctaggtgaaaggccagaagcagtgggatattgaaattctcagaagtggagagactgtggcaaggaggtacagaagacactaaatcgggtgccatgttagcaagctcaagttttcatattgatcatgcagtgagctgcagagaagaaaagcagctttgcctgggtcctgttgttctccaagccaaatagcatctctgtgctgacagacgagtctgcgtctgcagacgcagcatctcttgactgtttgctatttaacgacagtcgtaacacatgagtgagctttactcatgtgggccctttattaacaataagccgcctctgtggcggctgggccccgcggggtcggggggtgggggtgcccaacgtggcagggaggcctgcaaggggaggccgaggcgccggtggaagcacaaaccacccggcgagtcagagcaggggtcggggcccctggccgcaccgtgccgcgcatgcgcagggtcccggggtccctggggtcccgggtttgtgcccccggggcggctgggccccgcgggaggggacggccaacgcggaaatgggccctttattcacaataagtgccaaaatccaaactgaacacatctaaaaaaattctaattaaggagcgtccactgctgctttctcaaaaattccttctgtgctattaaatattttctctttccaatggatatttaccatttctactcacagtagtttttctaccaagtattcagaaaaacctccagttgtcacttacccagtgtttaccaaaaatcaggcagaagagcgtggtggaagttggaagaccttagtgtaacccgcgtctataaaaactgggcgtccaggccgggcacggtggctcacgcctgtattcccagcacgttgggagtccaaggcaggaggatcacttgagtccaggagttcaagaccagcccggacaacatagaaaaaccctgtctgtacaagaaatttaaaaattagctgggtgtggttgtatgtgtgcgtcatcctagctacttgggaggctgaagtgggaggatcacttgagcctgggaggcagcggttgcagtgagcagagctcacaccagtgcactccagcctgggtgacagtgagatcctgtctcaaaaaaaagaaaaaaaaaaaaaaaaattggatgacgttgggcaagtgtggtgtctgtctcagctctgtgagtgtaggatgattcagaatctaatgattaggtctcctgaactcctaggtcaaacgtggttaaagggagatccagggaagcagtgaggaatgggctcttacaacactgtcatggacatgggttcaatatgttggcaattattatttattgaggacgtactttgttttaagtgcttaggataattatttgcttaatagtcacgtaagtccttcaagataggcattattatcgccattttactaatgaggaaactatgttaaaataatatattcctggtcacacagcgaccaagagtcaggatctgtctgccttcagagttcatagtctttccagtagcctcagtaaaaagtaataatagctaatatttactgagcacttactatgtcactgacattgtggaaagggatgttatgggcatttgctcttttaatgatcacagtaactctgctaggccagtactgttattatggccgatttatagatgtggacagaggaggttaaacactcgtgcatggacacatactgatcaacgtacagccagcactcaaacccaggccgcctgtctccagagcctgtgcccccaagctctaggccatgtgccctgtaagtcgcagatgggacgctctgacagcgagtgtcactgaggtcggagtgggtcatcaggcatgcctcagaatcccattccccacttcattcacacctgagaacgcctgtctctggatgcatctttacaccagctcatccatttaaaatcagttccctaatacaacaagctgaggatgaggccccttctaactaggccaccgtcagagtcccaatcctttctgacagaccagcccccgacatgtgtctgtctccatccttgcagcctggccagccctgtcccacgcctgctaattggtggggggacctggccccccaagcctgccggccattagcagtgcctcacggggaagggctttcttccttggtttcaactccctccctccagcgcgcagtcccttgccgggcttgcctggtgacagactcgtgttgatgaagacctttagggaatttccttccccctccgctccccgaagcgcttcttagagcacatctcattaccgggctccattctcccgtcctgcacatgctccctcacacttagctttattgtgccaccacttgtcacctttcccggcccggtttttaataatgcaaatcttccctctctgatggcatcgctgctcattatttgctgtctggcaccacgggagctcacccagcggcacctcggagaagccagccgcccagggtgcaggcgcaggccccactgcccgccccagtctcctgagagatggctccgctctggctatgacccaagatgctcatggagggaagagcagtccagggccagggcccttccaccttcgccaggcaggtgcctttgagcaagtcaatctctgcagcctcaaaataggaaagatggtaataattattataataatatccccttaacaaagcagttatggggcaaccaaatggaagtaagatacgagaaaagtctgtataaactgtaagatttgtaaaacttgtaaagaagttgtggtggtgttgctgatggatgattgattgatttggtcaacacggagcagtcgctgccccaaagtaggcctggagggcaccccagccccctcatctgccctcccacccccaaactcagcatggaatcatatggctttggactttctccaggtggataaagccccctgatctttgaacatgtcatgcaggattattattgtgtgttttgtttgggcaaagaaatttaagccaatttacttttgttctgtaactcataactgaactgtgctcagagtctctggggtcctttcaggcatgggtctgtggttctgtaatggtaactatgggttgatggagcaatggctttgtaaaatatgtttaaaagctccctctgaattgagggatcacagcctccttagttgtcccctggatttcctggcattggagttatgtaagacctccatgatcattgccatctggaatatgactctttggtaccccaaaaaacttctggagtctttcagtcatatggaatcaaaaagatcttcctttggaagaagcaattttagatcactgatggaaattttaccagaaaagtattcaaatcttttccttttataaaacctgggtttgttttttgttttttaattatactttcagttctgggatacatgtatagaatgtgcaggtttgttacataggtatacacatgccatggtggtttgctgcacccatcaacccgtcatctacattaggtatttctcctaatgctatccctcccctagctccccagcccccaacaggccccggtgtatgatgttcccctccctgtgtccatgtattctcattgttcaactcccacttatgagtgagaacatgcagtgtttggttttctattcctgtattagtttgctgagaatgatggtttcctgcttcatccatgtccctgcaaaggacatgaactcatccttttttatggctgcatagtattccatggtgtatatgtgccacattttctttattctgtctatcattgatgggcatttgggttggttccaagtctttgctattgtgaacagtgccacaataaacatacgtgtgcatgtgtctttatagtagaatgatttataatcctttgggtatatacccagtaatgggattgctgggtcaaatggtatttctggttctagatccttgaggaatcaccacactgtcttccacaatggttgaactaatttacactcccaccaaaagtgtaaaagcattgctatttctccacatcctctccagcatctgttgtttcctcactttttaatgatcgccattctaactggtgtgagatggtatctcattgtggtgttgctttgcatttccctaatgaccagtgatgatgagctttttttcatatgtttgttggccacataaatgttttcttttgagaagtgtctgttcatatccttctcccgctttttgatgggtttgtttttttcttgtaaatttgtttaagttctttgtagattctggatattagccctatgtcagatgaatagattgcaaaaattttcttccattctgtaggttgcctgttcactctgatgatagtttcttttgctgtgcagaagctcttagtttaattagatcccatttgtcaattttggcttttgttgccattgcttttggtgttttagacatgaagtctttgcccatgcctatgtcctgaatggtattgcctagatttttgtctagggtgttttatggttttaggtcttacatttaagtctttaatccaacttgagttactttttgtataaggtataaggaaggggtccggtttcagttttctgcatatggctagccagttttcccaacaccatttattaaatagggaatcctttccccattgcttgttttgtcaggtttgtcaaagaccagattattgtagatgtgtggtgttatttctgaggcctctgttctgttacatttgtctatatctctgttttggtaccagtaccatgctgttttggttagtgtagccttgtagtataatttgaggtcaggtagcgtgatgcctccagctttgttctttttgcttaggattgtcttggctatatgggctcttttttggttccaaatgaaatttaaagtagttttttctaattctatgaagaaagtcaatggtagcttggtgggaatagcattgaatctataaattattttgggcagtgtggccatattcacgatattgtttcttcctttccataagcatagaatgtttttccatttgtttgtgtcctctcttattttcttgagcagtggtttgtatttccccttgaagaggtccttcacatcccttgtaagttgtattcctaggtattttattctctttgtagcaattgtgaatgggagttcactcatgatttggctctctgtctattactggtgtataggaaggcttgtgatttttgcacaatgattttgtatcctgtgactttcctgaatttgcttatcagcttaaggagattttgggctgagacgacggggttttctaaatatagaatcatgttatctgcaaacaggcaatttgacttactctcttcctatttggataccctttatttctttctcttgcctgatcgccctggccagaacttccaataccatattgaataggagtggtgagagagggcattcttgtattgtgctggttttcaaagggaatgcttccagcttttgcctattcagtatgatattggctgtgggtttgtcataaatagctcttattattttgagaaacgtttcatcgatacctaatttactgagagtttttagcatgaaggggtgttgaattttgttgaaggccttttctgcatctattgagataatcgtggtttttgtcattcgttctgtttatgtgatggcttacatttattgatttgcgtatgttgaaccagccttgcatcccaaagatgaagccgacctgatcgtggtggataagctttttgatgtgctgctggattcagtttgccagtattttattgaggattttcacatcgatgttcatcagggatattggcctgaaattttctttttttgttgtgtctctgccaggttttggtatcaggatgattctggcctcataaaatgggttagggaggagtccctctttttctatagtttggaatagtttcagaaggaatggtatcagctcttctttgtacctctggtagaattcagctgtgaatctgtctggtcctgggctttttttggttggtaggctgcgaaattactgcctcaatttcagaactagatattgatctattcagggattcgacttcttcttggtttaggcttgggagggtgtatgtgtccaggaatttatccatttcttctagattttgtagtttatttgcatagaggtgttcatagtattctctgacggtagtttgtatttctgtgggatcagtggtgatatcccctttatcattttttattgtgtctatttgattcttctctcttttcttctttgttagtctggctagcggtctattttgataatcttttcaaaaaaccagctcctggattcattgattttttgaaggattttttgtgtctctatttccttcagttctgctctgatcttagttatttcttgccttctgctagcttttgaatctgtttgctcttgcttctctagttcttttaattgtgatgttagggtgtcgattttagatctttcctgctttctcctgtggacattgagtgctataaatttccctctaaacattgctttaaatgtgtcccagagattctggtatgttgtgtctttgtgctcattggtttcaaagaaattatttatttctgccttcatttcattatttacccaatagtcattcagaagcaggttgttcagtttccatgtagttgtgcagttttgagtgagtttcttaaccctgagttctaatttgattgcagtgtggtctgagagactgtttgttatgattttcatttttttgcatttacttccaattatgtggtcgatttcagaatatgtggtgctgagaagaatgtatattctgttgatttgggttggagagttctgtagatgtcttttaggttcactcagtcctgagctgagttcaagccctgaatatccttattaattttctgtctcgttgctctaatattgacagtgggatgttaaagtctcccactattattgtgtgggagtctaaatctctttgtaggtctctgagaatttgctttgcgaatctgggtgctcctgtattgggtgcatatatatttaggatcattagctctgcttgttgcattgacccctttaccattatgtaacgccttaattgtctttttttaatctttgttggtttaaagtctgttttatcagacactacgaccgcaacccttgctttttttgtttgttttccatttgcttggtaaatcttcctccatccctttattttgaggctatgtgtgactcagatgggtctcctgaatacagcaccctgatgggtcttgactctttatccaatttgccagtctatatcttttaattggggcatttagcccatttacatttaaggttaatattgttatgtgtgaatttgatcctgtcattatgatgctagctggttatttttcccattagtcgatgcagttttttcatagcatgaatggtctttacaatttggtatctttgtgcagtgggctggtaccagttgatcctttccatgtttagtgcttccttcaggagctcttgtaaggcaggcctggtggtgacaaaatctctcagcatttgcctgtctgtaagggattttatttctcctttgcttatgaagcttagtttggctggatatgaaattctgggttgaaaattctttaagagtgttgactattggcccccaccctcttctggcttgtagggtttctgcagagagatctgctgttagtctagggaagatgggcttccctttgtgggtaacctgacctttctctctagtgcccataacatttttccatcatttcaaccttggtgaatctgacgattttgtgtcttggggttgctcttctcgaggagtatctttttggtgttctctatatattctgaatttaaatgttggcctgtcctgctagtttgaggaaattctcctggataatatcctgaagagtggtttccaacttggttccattctccctatcactttcaggtacaccaatcaaacataggtttggtcttttcacatagttccatatttcttggaggctttgttcattccttttcattcttttttctctaatcttgtcttcacgctttatttcactaagttgatcttcaatctctgctatcctttcttccgcttgatcgattcagctattgatactgtgtgtgcttcatgaagttctcatgctgtgtttttcaactccatcaggtcatttgtgttcttctctaaactggctattctagttagcaattcctctaaccttttttcaaggttcttagcttccttgtattgggttagagcatgctcctttagttcagatagagagatgataagggatcagaagaggccagtggtgaattaactctgtagcctagaaccttgtaggggtaaaaactatttatcatcacctacacactcttactgggcatttattgtggccaagactcgggttcctgtgtgtctgtagagggccttcattgtgggtatccacaaagtgagttgaaacaaagctcatgcatgagaagcgctgatggagttctcccttgctcctgccaccttcttatcatctgtagtctttttcttactgctgagggatccttccagtggtcacatttgcccatagccctcctgaacgcttgagtctgcagaaaacctctagctggacagcttctgggtagagaaacaggccatgaagagcctcctacatgtgcaccatgtggctacgctccgtgacgagggaaaaacaggaatatctgtctgctgtgatcacgtgtagtggtcacggtgagagatgacggggctgctcctcctcagcctccagtcaggctgtgtggcagcgatcacctccatgtcgatggagtgtctgtgcagtttgggagcgaggctctgcctctctcggtgagtgtctcacagttcctttctccctcagccccatgatgccgtccagaacaaggtgctgaactgattaatgagcaggacataaagacaactgctgtccagagcaacagctgtcccaatccatccgtggaataaacaaacagggcagagcgaggtcccgaccagtggggacttgggtgcaggaaatgccagtctcttcttgcttgaatcagggtgtcagggggccttcctggccaccactcaggctgttcctttagctttctggatcccattccctgcaggtctacccttgggagtgaaatagtgaccgtccctttgagcccgagagctggggagaaggccgtgcctgttaacagctgcctggaccctctctggagagcagcagggagaggcggggctggaggagatgttgccaagaacctaagggtgttagtgacaaaagcaagaactcctggcaacaagtccgagggactttcttgatcacaagtggtatctcctaagcactttaattatagcagattaagcaggaagtggagtgccggactaaaggaataatgatacaaaggaggtgaagcagaaaaacttaatttccttcctttaagggaaaaaaaagtccatttatttagacgcattgcaaagaaaagaatggagtgtggcctttcccccagctcggagctcagtgggtttttaaagaactgtgtgtatctctttggccagaccagcgactgggatcttcagcctctctgcagaaaatgagccgcaggctcgggatttcgttaagatgcaggagcattccttctggaccaatgactcactcattcagccccttctttcccgcttctccttgtcagccctcgcctggctgagctcatattttacattcagcacctctggttacccagaaattgcatgcaaaattgtgaaatagaaaagcagtgggctgtgggctccatcagctctgcctggcgttgcatcatccttgacttgcaatgctcagaggctgggctaggagatttgcttacagaaagcctgaaggtcccagggaccttcccaaagttgcgacttgaatgcatgctcttagcacacatgctgtgtaactggggcagatctgtaggaatgagtggaactgaaatcagaccttagaaagtcacagtgaataagaaaattgccagaatggaatgcagatatacctactggttactgtcctgtatgtagcggctgtgtgggatttgactgtgttttactaataggagccttgttgggcccagtgcttcataactagctctgtctgtcgggaatcccccacagtatcctgcttgtgattcacgctatccagagtccagggcaaggagttctaaaaccttatcatgttttgttttgttttgatacagagtttcactcttgttgcccaggctggagtgtaatggcgtgatcttggctcaccacaacctccgcttcccgggttcacgccattcttctgcctcagcctcccgagtagctgggactacaggcgcccgccaccatgcccggctaattttttgtatttttagtagagacggggtttcaccgtgttagccaggatggtctctatctcctgaccttgtgatccgcccgcctcggcctcccaaagtgctgggattacaggcgtgagccaccacgcctggccgttttgtttttgagagacaaggtctcgctctgtcacccaggctggagtgcagtggcatgatcatagctcactgtaaccttgaactcctgagctcaagtgaccctgctacctcaacctcccaagtagctggcacctgtaggtgtgcaccatcacacctggctatttttttttaattaactttttgtagagatgggctctcaccatgttgcccaggcttgtcttgaactcccacctctgcccacatgctgggcattcaattcctagatctcttcctccctcctctcttgacttgcctcctcctggatcatgatatcttatcattttccaatcacagcgttaatggtaaggcttgaggctgggcgtggcacccatgcctgtaaacccagtgctttgggaggcagaggtgggagttcaagacaagcctgggccatgttcagcactttacatgcccattcactgagtttgcacagccgcccatatgacgggcattgttattcctactgtacaggtgaggaaatgggggctctgagaagtgtgactgtttgtgggaggcagcagctggcatgatggaaaaagtgtaggcattggaggtgggatccaagtccagtcttccacccacaggttcagtgatgtggggcaagttatataacacagttttctcatctgtaaaatctggacaggcatacctacaccctggagcattgggaggattaaatgagatcgtgtagataacagcatagtcctggcatatgagagaaaatggcagggatctttctatgacctcagtgtgagaagcaagatctaaaccctcagaggtagagtgcgtcccacactcgggctccttctactgggacactggcttccggatctccacggagaactgttcttaagttagaaggcaagcacagcggggacacggtgcaggacacctgcggacccagtgcccttgggattctttaccttcagctttgctcactgcagattagtcctcatcgctcagcagagagagtcgagattggcaggaggatctccgtcttgaacaacattatgattctctgagcatttctatatgttgaaaatattttatttaaaaattacaaccacccctcctcctcaaaattgcatgacagagatttcaccaaacctgacaactgatgagacaaagagaacaagacacagagaggaatttagaaataatccttgtgcataccttccgaagttgccacatattactaaaattacctgtatctgtgtctatcctgctactctatgcattacatatctttgcatcccccatgcctagcacagtgcccagcacatagtaggtgctcaaaaaaagtgcccatcatttgttggactgaactcacaacacagtaacaaagagccagttagagcaaatgctgtcccttttcccaggactgtagcttccagacccgtgtgaggcctcagcctgatttctgttcaccttagaaccccaaggctgactgtgcatttccataagcacctcgctcgcctgcaggacggggctgggttggtggtgggtaccagaggtgctcagtgttcaatcacgcagaaagtgggctaaagggcagcgcctcctgctccctccagagatgcacttccattctctgaaacgacaacttctctgcactcgcttaatgggatcccaaataacacgtcgcagaccagtcttttatcactgttgccccttggaacacatttcgaatgctggccattaaaagcaggccatttcacggttctttaatgatgacactaataactgtggatttttgtctcccagagtcctgatgagctgagccaaggagtaaattacggagctaacttttatgtgcatggtttattgatctgtgagcttcaaggaaactgcaccagcccctatagtttggcagtccagactaccttttcatctgtgtaattgggccacgagggcgcagttaatattcaatttatattaataggaagacaaagaacatgatgtgccagctccatattgaagtaatgggcatatcaaaatattctacctggtaattataaataaatcagttttcccgtgacccaccaaggatgatgttgctaattcactgtgcatttcatcataatttatcctgagaaagttcagtgctgccatgtgcatgtatatcgcagagtatacaagggtgctccatcgtaaaacacccagctgtcttcatccatgctgtcgcccatcttttcttaacaggtgaaagtcatgcttcgcatctgttccaccttggctcgagatacttcagaatccagctctttcttaaaggtggacccacggaagaagcagatcaccttgtacgatcccctgacttgtggaggtcaaaatgccttccaaaagagaggcaaccaggttcctccaaagatgtttgccttcgatgcagtttttccacaagacgcttctcaggtgggtatcagccccctctcaggctcaggcaacgttgatgaaagggcaacgtttactcattcacaagggcccttgagctgggagggtgtcttctggagcattctgatggaccagttccttcaggagtcaatctgagctccaccgaatggtccagtgcttttgaattactggtgtcagaccttgggcaggatcagtgtgcacagatttcaataaaatctgtccttggggagaaggaagtgtgagccagtcagtggatcacacacagaagcaggaagataacagaaagggacaaggacaatgcgtcaaggtgctggtgacagatctagtaggaccctactcctgcctgggcattgtacgaagggaaaaaaaaaagtgtttcagggagctgattagaattaggccatctcctaggccctgtataagcacactggggttgagggcaagcctgtagccctagtaaggaaccagagtgcaaggcagggaaaccgaggctgacatgcatcctgtggcctggctcagtggagtgaaggggaagaagagaggctcagggacaggtgttgtattcgctgaattgctgccttacaaatcaccctaaaattcagtgcttaatacagtaagcatttatcattgctcatcggtcagctgagcagctcttctggtcctagctcagctcatttttatgtctgtgatcagctgtgggttgggcaggcagctctgtggatcttggctggatatcagccaggcgaaataagatcatcctatatcacaccataggcacatgtctttgggggttggctggccttacactggtgtagaatagccttgaccaggtcagctggtctctcttccacattgtcggtcgtcatccagcaggctagcttgggctagttctcaaggcagtttccaggacccatgcatgcaggtctctggaggcctaagctcagaattgacccaatatcacttctgctggattctactggcccagcttcatgagatggagaagagattgcttctaatgattggacgagctccaagtcacattgcaagggagttgcacccaggctggggtggagaattggggccatttttattaatctactatgagcataattgggaggctacttgggggcccagggtaccaagattactgagccatgggcagccaatgaactgcagacctcaccagatgctgcaactaaagctgctagtagatatctgttctcctttggattcaccctggagctttggtgaagatgggcctctaagtggcacgaaacagcacctgttccttcaggggagggagcagggacagacgtgtagaactgattgcagaaatgaataacccaggttatagaatatagcctactttgcctggagtttgcatctttctggtaagtttctagtgcttatcaagatttacattaaacagtgtataggataataactaataatctatagcagaacctgacgacaacagtgcgaatagttaccatttgcagcctctgtgaatttcctccaggctgcatctgagtagaggaggtggcgatgttctcacgggctcctatattacaccgtgggcacacagcacatgttacaggctccattcattaagaagttgagcatgcggtttccccaaagagttttacccaagaagacaaagtactttatgaataagttctatggtttctctccttattacattttttgtgtggcatatcacccaatgggctcagtaatttaaacctgacgtttggtctaacaaatggcctacaaataatttcattaacacagttaaaacttttcagaagcaaatctccacaagttgtaagaattccaaagcaaaccctaaatcaagcatggactatgaatgcgttttagatttattccagaaaaagggtccattttaattgctagtctttgtttacatttcacactcggctgcagagctcagtatgctcaatactggagtttcgctcatttcagaatgccttactttcattcacatttccaatgttataataaattacatgtctgtataaatttgcagttttcaagacatttcgtagacattaacacatttgactcttcctagaattcagtggggtaggaagagaggcactgatgttctcatgtgacacacaaggaaaccgagactcaaagatgaagtcacttgttcaaagtccctttcccgagcagacgtccttcctggattccccccgttaacctctctgtatcctgctcggtatggtggtgtatctttgacctcctgccattttatccaatatttcctagcagtgtggcctcaggcgagtcactcaacctctctggacctcagtgtccttcctcatctgtcaggtgaggacatgaccacaatgttcctcatcaggccgtgtgattcctcgagttgacacacaggaagtgctcacagcagagccaggaacacagcaagtgctcaacaaatgcggctatttttaccgttatcactgccaatattagcagcatgctgctggccagggcaaactcagccccacagggtgggcacccctggagcccccaagcctgaaaggagggagtgtgcggagtgggcctgtgctctccagtcctcattttcagcctgtgaagccgcagccactgtggtgacccgggcagttagaaattgtgctttctcttcgtttctaaggaaatcagcttcctgaagctaaacagtgattagaacagtcctgtttcatggttgcctttgagagccatatgacccttcagtggcttcggcagtcgctggctgcccctgttgggacacgtctctgctgggacacacccctgctggagaacctggacttgtgggcaggcagagccttcctgcagacctggcccttcccatgggggctgtgctcgagaaggctgcatgcctctccaggtcccaggggaagcagcaaggggcctccggggcccctgccagctcttaacacacaccagatggacagcccgctgaccacgctcttctcagtggagagccgggtgggaactgtgccaggggatgccgccccaactctgcacagcaggtctcctctcgcccccggcctctgcacgggtgactcagtgtggtccacacacagccaacattctcccaggtggctcaagaatcaaatacagcttattttatgtatagctcaaggtgatttctcagcctcctgcctcccatcccactttatgtccaaagaaggcttagtccattgggcagccttctgcctgctctgcagacacgcctctggcaaattccatcaagacgctactgcttctgtctcagggttagcactgggctctccttgcctaagtcctggggggtttgaaagatcctgtgtgccctacagcagccctgtcctgccaccccctctggcccaggaggagccccccgccccccgcagagttgctggggaccaccctggaacaagtgacagctgttggaagtgtggtttttcaattttagtttaggagagaaaactgatttccaaatacttgggttcactgtgctgctgaataacaacattcacggcccaggtgcccaccgggaggcacgctgccccgagggctgcaaagccccatgttagcactgcctcccggagctcccacgagccctgactccggccccgagacagaaatgaaagcaacagggcacagcgaataatgctatctttctgcttctgtgacaagtctcaggtgctaaacaaagagaaggacatttcccagatctccaagttagtccacaaaaccgacagctctgatggctcgcagagctctgtattagcgggtgttcaggggaaatacaaaacatcatcgagagcctggtccctgtctaggatttaataatcaaattggagaccagacacacacacccggccaaagaacacctaataacataccatgtggtgactgatactctatatgttgaatgtatctgtagcaaaaggaagaaaaggcaggttttgaaaagaggagcatgggacgggcgcagtggctcacgcctgtaatcccagcactttgggaggccgaggcgggtggatcacctgaggtcaggagtttgagaccagcctgaccaacgtggtgaaaccccctctctactaaaaaaatgcaaaaaattagccaggcatggtggcacatgcctgtaatcccagctactcgggaggctgaggcaagagaatcacttgagcccaggaggcggaggttgcagtgagttgagatcgcaccattgcactccagcctgggcaacgagactgaaactccgtctcaaaaaaaaaaaaaaaaaaaaaaatgaggaaggtgtgaattgaaaatgaggaaagagatcaggagagaaagcagatatatatcacaaacctcttgcttacgtgagaactacggtgtttctcaaggtctcacttgtgaaatggtgggtcacctttttccctctcataagcctggcctgtttaataaactctatgtatacgtgtgtcagcagagggtgagtggagagtttaaagaccttatccgggaccccagaatggcagatgagggaagggaatgaggttcatgagcacactgtgcccccattccagcctgctcctgcctgctctacagacgcattcgctgaaacgtaccacggattagcagaagggtggtttgcagtgcatgtgcataatgctcaggcttgcaaagggcggaaggtcgccaggggttctgagcatctccaaaacttcacgacagaggccaacccacctgggaacacagtgacactgggacccgaagccccaggaaggtgggctcactttcgttgttagtggtgtctccgctgcgaggtccattcacggctcgtgtctcctcttgtgtctgacaggctgaagtgtgtgcaggcaccgtggcagaggtgatccagtctgtggtcaacggggcagatggctgcgtgttctgtttcggccacgccaaactgggttcgtgagagtttcactttctcatgcggctcgttgagctccctgtcatcccatgcattcctctgtctccctcccagagttctctgatgacaggaagggctgcgtttctcttaggtgttgagctgaataaccaataacaagttatacgacgaaaacctatgttgttcattgtaggtggacacccattcatgtaggaaagccttcaagtccaaatagatggaaagagaagtagcagagttgttcccacttggtccaggtcagagtcaagcccagaaggcaggcaggaaaatattcatttcctgagcagccgctgtttgggaagcagatagggccccttgcaccaccgcacccatgaggatgtgggttggtggttggacccctgtaaaagccagaggagcaacctccaagcaaagcccagagcccagggcgcgtctggagaaagcagtgcacaccgtcgggaacactccagcgctgaagcgtctgggaaaggaggcagcagagccccccaacaaggggttcataaatccccccacagtcccatcttacttctgacctgtggccatctgctccccaggccttgcccttacacgcttgatatgtttagtgaattgaggagcttcaaaaactgtcccttggcagagattccaacagaggccttgctggagctcacagaggccagttctcagccaggacagaaagccattgcctctctctgcacttccgtcctccccagccctttctcttgatcttgatgtaagcagtgatctgggttttaatagaatttgctcatgccataaaaatatacacagcatttaacttgagacaggatataaagtgtgaatatgtggacttaatctggggggtaactataaaaagaaccataatgatgatgaaaaagcccagccttcccactgtgtgtaaagcagtgcaggaactggatagcatgtgatatttggggtcctcctcaaggtacatggtgatttaatcttgtcacatgtctgggctcttgctttgtttcttttttttttaagagatggctctcagttgcctgggctggagtacagtggcatgctcatagattactgtaacctccaattcctgggctcaagtgatcctctcgcctcagcttcccaagtagctggggccacaggcatgccccaccacacccagataatttttaaaaatttttcatagaggcagggtctccgtatgttgcccagactggcctggaactcctggcctcaagcaatcctcccatcttggcccccacaaagtgctgaggttacaggcatgagccactgagcccaaccagcattctttattgtagccatttagttagtaataccagaaaatgccttctgttgttgtcaaatactatttctctcatctttttgttccttctcttcccttttccccccttccctgtgcctttcttctatatccttggcatctattttggagactccgtggaatgatgcctggacactgaacctgcttttcttccttccctggttctcccaggaaaatcctacaccatgatcggaaaggatgattccatgcagaacctgggcatcattccctgtgccatctcttggctcttcaagctcataaacgaacgcaaggaaaagaccggcgcccgtttctcagtccgggtttccgccgtggaagtgtgggggaaggaggagaacctgcgggacctgctgtcggaggtggccacgggcagcctgcaggacggccagtccccgggcgtgtacctctgtgaggaccccatctgcggcacgcaggtgattgcttctgaagcctggctcgccccaaggtggctccctccccacctcagaggctggggcagctccacccgtgaatcactgaacctgtaaactcagaggcttacgggtgtttactttaaagtggactggaactttatggcctgcagctgtggggccatcggcttgcccagtctaaatatttgtaccttgactctaattgacaatgagcagggaccacaattacagcatttgggggagaaatggaattcactttctttatgcccctttcaaaaaaaaaaagtaacaatctttcttttgtttaacaacaaaccggaatatttactgctctgcacaaatagctagagccattacggggctgttgatgactctataaactgtgcttctggcactggtttacagccggattagcagtgctgcaggaaaaactaataaccactttctaattagaaccgtgatataattgctagaactatggaagccaagagaagctccagttcaccatttcaggatgctaagcctgttgggagggtctctcctttgctgtttgacaacagatgtaggaatgacccgggagctgcaattcattcatatccagaataatcaatccttccagtctctaacagtaggctttattttcccgtgttgtcagatgcctccttttgtagataggtgttccgtttgataagtacctgcctcttcccaactgggattgtttgcacaggtgaggatacctcccgtggcctgttatactcattactcaaacctgaccatgctcttcccctgcttaaagcacctcagatccctccatttccctgagtcctctttcgtctgcatctgtcacctcgaggacttgtttaaacactgatcgctgggcacccccccagagtttccaattcagtaggtctagagtagagctccaaaatgtgcatttccaacaagttcccatgagatgctcatgctgccggtccagggatcacagttggaaatcactgttctgaggcatcaaatgtgcagagacagtatctacacagtgtctgtgatgcaatcagtaggactcgacccactgctcctgttccaggcattttctagacattcaaatatgctttcacccccattcatttttagaacttcattgatgaaattccactaaggggtgaaaagtctggttaaatgaaggctaagaaaaagaagaaaagaccaatattccctttaattcttgttgaaaaatcttttaaattctttggtttatttttccatagcgagacaaaattttgaacacaaaagaatctctctttgaagtctgaggattttgatggcctcaggttctaaatattggctcttacagttcaaaattatttgtatagttagagtagaaaattgtcagaatttgtaccaaccttaagacatgtactgcaaattagttctttgaacaaatcagaaacatgagttgccttttctccccaaaaagaggagtgctggttcaattctgttaatgtgatcgttgtgattcaggtttaaaataattgccaagtattttcataagattcagacgcattaccctgtgtgctttctttaatcaattaatgagtatgccgggagcatggattcaggaactaaaggtaaataggtatctcctaaatttagatgagacattcaagtatcgtgagtgtttgagggtgccctttacactggtttcttatttataactatgctagtaaatatggcctaaaattggctttaattaaataactgcaaaactaggagtcaaatgaaagctaaccaagtttttttacatctttgggacaccactgctatgaggcctcaaatcacattttgcaacctacctgtctccaaacaatctaatctttggactcaagatgcagtcacatcgctcctgttttcttaggtaaatggatagccaggggtgttggtttgccgccctctgcagagataaggatgagccatctgctcccagcttttcacacccactagttccagattctacttagactgtaaagtaggtaaaaataggtttcatccaataagtatgctcaatattaattttcagaaatgaattaattaagctgagaattgcacatgagcatagcaccttgtttcagaagggttttcagccttagaggggcacgtggctttactatacagaacacacagccagctgaatggtgctggggacacccaggcatgagtgacagcaagccctcctcagcctgcagcctcatctcttggcttctgtcttccagctgcagaaccagagcgagctgcgggcccccaccgcagagaaggctgcctttttcctggatgccgccattgcctcccgcaggagccaccaacaggactgtgatgaggacgaccaccgcaactcacacgtgttcttcacactgcacatctaccagtaccggatggagaagagcgggaaagggggaagtaagtcggccactccaccctcctgcctccttagcggctctggccccagccagaaatcccttgggcaaccatgacctttgtgtgtgtgtgtgtgtgtgtgtgtgtgtgtgtgtgtgtgtgtgtgtgtgtgagagagagagagagagagagagagacagggtcttgctctgtcacccaggctgcagtgcagtggcacgatcacagctcactgcagcctcaaactcctgggctcaagtgatcctcctgcctcagtctcccaagtagcttgggactacaggctcatgccaccacacctagctatttatttggttatctttgtagagatgggaccttgctatgttgcccaggctggtctagaactcccggtcttgagatcctcttgccttgatctcccaaagtgttgggatgaaaggtatgagccaccatgcctagccaaacttttcttaatagactacaatatgcagttcagtgactcgtaattcaagataattatagtatctgggctgaagttcacttttgaactgtccagggaaaggagtttgctttggtaaaggtaatttacaaatgtcattgccatgagaatgtgagaggtcaaagttacaaaaagaaaacaactgcctgacagtatctttttgttcacagacctcaaaaatgctcctcaagaaagaccaacatttatccaccaaagcactccggcagtgtgttatcatcattagctcgaggccactgtatggaccatgttttttaaaatagcatagaaatcagacttttgaataactacccagaccctggctgcctccctcaaatcgtcagtgaaggtttactgtcaaaacccaggtacggtgcctgctcttcgagtgagctgccctgccaggaacccaacactgtgcccctacagacccctcttggctgtgtttccaaagtcagcccgggctggggtgcaattctctgccttctgtgaagtagtgtttactctatgcccaaaagagttgagcaccagatcagctgaatgtctccagtggggatcttggaccaggggcaaagtggtctgttgatttcactgggttcctaaggcaggttgtgggtaacggggctgctgggctggccgggcagtggcttccgtggttcctccatgtcccgctctgccgggctttcaatacacaggcaactggctcccagcgctttctgcatgattgtctcaaagacactggatgccagaaaaacaatcagaaaactgagttaagagtctaaccctggactggaaattgtaaagctcattgagtaaagcagagatggtccgcaaagctgttgtagatgaagcctagaatgaagacatccaagtaggaccaggcgtggtggctcacacctgtaatcccagcactttggaaggccaaggtggttagatcacttgaggtcagcagtttgagaccagcctggccaacatggagaaaccccgtctctactaaaaataaaaaaattagctgggcgtggtggcacacacctcccagctagttgggggtctgaggcaggagaattgcttgaacccaggaggcggaggttgcagtgagcccagatcgtgccactgcactccagcctgggtgacagagcaaggctctgtctcagaaaataaaaataaaaagacttccagctgggatctatggacaggctccccctgatttcccctaagcctcctcgtggctcaaaagacctggacaacagtactcctggggagagagctctttgcgggcttctgctgtccccaggcaaaagcgcctcccttcccccacctcggtgcctctcttcctactctttagttactgttgttaaaatccaggtttattgcagtataaggtacattcaccaaaacatcactttgatgtgtctttagatgagttttggccaatctatacagtcatgtagccaccaccattatcaaaatagagcataaggctaaagttccctcttgccgtttgtcccttcccctgacctctagcccctggcaaccacggatctgattgttgtcctggttttgcgtttatccaggatatcgtgggaatggactcgtgtggcccagatgtggccttttgtgtctggcttctttcacgtagtgtcctaatgcatttgagactcccccatgctgcagcacgcgtctcttgtttcttctggttcctgctgcctgttctgcctgctcctttagtttttttgtttgtttgagatgaagtctcactcactctgttgcccaggctggagtacagtggcgtgatctcggctcactgcaacctccgcctcccgagttcaagcgattctcctgcctcagcctcctgagtagctgggaatacaggtgcccaccaccatgtctggctaatttttgtacgttaagtagagacggagtttcaccatattggccaggatggtcttgaactcctgacctcgtgatccacccgcctcagcctcccaaagtgttgggattacaggcgtgagccaccgcacctggcctctccttcagttttgactgggcctggaggcttggttcctaccctaccaccaggacagaatgaaaatatccacagctggggctggagttcctctaactggggctgctttttatggctctgaaaatcagccctgagctgcctccagtggctgctgtgaagaaccgagaggttctggtcctcacttacagcgggcgaggcgccccagggaagtggcccattagcttgagggcagctctctcgacagcccatgatggtgagcaaagtctcactggagaggagccgaggatagtgaacgggaatctctcgggagatgtattcttggtaacaggctcacaccatgtagagcgcttccgtttagaatcacgttcttaaagaaggaaacgcattcggatagggatgaggagatgcagacctttaaaatcggatagggatgaggagatgcagacctttaaaatcggatagggatgaggagatgcagacctttaaaatcggatagggatgaggagatgcagacctttaaaatcggatagggatgaggagatgcagacctttaaaatcgacagcacaattgcatccacatttctcctgactgtgtgggagttggccttgaaccctgccctcactgttttctcctgggtagtgtcttcaccctgtcaatgtaagagtctgacaaatgtttagtttattcttttaagcagctgtcagtaatcatcatcatcagagcctgcaggactttcttgtactttcagtaaagagtgactcgcaaaacatctaacccttgagccaaatgactcccaaatggcactgatcagaaaaacttgggagatgggattatctctcctccttccaggtttcaaaccaaactgaggacaactctgttttcggttttgtactttttttcttttttgcagttctgctttcgatttggaatctgaaagtagggagaaatcttgaaaacaaggaaacagttcattaaatgacttcaaatataagaacttgaaattcagattccacaaaagtttaggccaagacattccctaaacccagtgatccaccccaaatcagtacctaaggaatcctgcacccttattaaatatttaatagccagctcatcttcttcctatttttaagttgtgaaagagaattgcttttaaataatgcattcaggttaaaagaaagggcaaataccacgaatggtttccaaaacctcggttaggtccttcctaatgtttcagtggatgagaacaaagaaggggaaggagtccaggggtcgtgcgatcggcagacctgggggacatctcttccctcccgaggggaaaggatcccggccagaatgcacacggcctccccgcctgggactcacttgacttcagtgaatttataactgtttaaaatataatgaggagatttggagggttgtttaaaatggaaattttgtttacttacatataagtaataatccctgcggacctggcagccagaactcaattaggggaaagtttattaattagtcaccctgcagggaagccattagaagagatctctgccgcaagaactaaatagactctgtgtgcgcctctgaatctcatatgcacacatgcattttatacattttacacacaaatgcatcttacatttataattttacacacaaatgcattttacacatataagtagacagacaaaaaaaagttttaaacatttccagtcaaaatagaaaagtctttgttgatgtatccctgttttgcagatagcactaggttaagcttaaaatatctccctgtttaaaagctcattggaattagtgggactgatccttcagcctcatggaggccttcctctgctttgcgaagctaaatctgtaatagcttgagagcctcctcgggaatcccagcactgggaaacagaccctgaagccctactgatcagagagctgcttctcataacgacgcgtgtactgggcacctaaaacaaggtggtgcttgggaccagaagtgtttcagatttcagattgttttccgattttggaatatttgcatatgtaatgatcccttgggaatgggacccaaatctaaatacagatttcatgtatgtttcatatatgccttatagacatagcctgaaggtaactttatacaatatcttcaataattttgtgcatgaaacaaagtttttactgcattttgactgcaacccctcacgaggtcaggtgtggaattttccccttgtggcatcatattggccttcaaaaagtttgagattcttggagtattttggatttcagattttttgggttagggatgctcagcgtggactagtgatacttcagggtaatgcgctaatgatacggagatcgcacctgtcctgttgacaaagataatttcaaaagccccacttttatgagtaatctaagcatgcaagcaactgttgctcaaggtccacaatgacaccgggtctctgatttgttcattctctttattgcctctgtggggaggattagagggctttgtaggctgggctgctgtgtgcgcacacaaatgtatgtgcacatgggcacacatctgtgctacactcatctgtctacacatctcatcagactctttaatctgtttttttgtttgtttgtttgtttgtttgtttttaacactgagtctcgcactgtcacccaggctggagtgcagtggcgcaatctcaactcacttcaacttccacctcctgggttccccgcgattctcctgcctcagcctcctgagtagctgagatgacaggcgtccaccacaacacctggctaatttttgtgttttttagtagagacggggtttcaccatgttggccacgctggtctcgaactcctgacctcaagtgatccacccacctcggcctccccaaagtgctgggattaccatacctagcctaatctgctttcttttgacaatgcaaatgttttctttacatgtcatggaatggcttaaatcaactaatgctgtatttagggctgtgtggtggatatgactctggagatccattctttgggtggcagatgtgggaaaagaggcttaggaaagaaccttgcttctaatggagccacagccagtcccctgctgtccccagcagcgaagccctgtgcagcaaggatgtccacacactacagggctctcatctcccgcttggtcaataatgaagtggcagtttcatctttttaggtttttgtaatctatatgtttttaaatgttggccaggagacactattctgaagagtgcagcctggaattcccatcaccgcctccgtttctaatcttctcaagcctcctggccactctcagcaggtaactagcatcttagtcaatgagaagacagagctgacctggtgcattcctcaacttctcttcttttggtttcatagtctcctggtccctttacctcagtttcccccctgctccttcccacaggcctgctgctcccgtctcctggcattcttcctcctgccccttctgcctcttctgggacctcaccaattgggaccccctcagtggtcttttcatgcttatgttttcagcctttcctcccaccaaagtcagggttacagaaggaagagaaggaggcagggagggagggaaaaggaaaggaaaggaaccacaatggcaccttgcctctgccacgctcctctccgatcgcctcctcaacaaagacgtcagattcccctctttgtaatgtcttctttgaatttcagcagtgtgggggatgttatgcttttgccttactccgccttatattttggctgtttgtgagctagtccaagccctattggactataggtgccttgagaaagagtgccacagtgccagggctgtgtctgctgcatgctgtttgtgagcttgtccaagccctattagactataggttccttgagacagagtgccaccgtcctggggctatgtccgcagcgtcagtatccaaggcctattagactataggttccttgagacagagtgccacagtgctggggctgtgtccgctgcgtcagtgtccaagccctattagactatagggtccttgagacagagtgccacagtgctggggctgtgtctgctgtgtgctgtttgtgagcttgtccaagccctattagactataggttccttgagacagagtgccacactcctggggctgtgtccactgcatcagtgtccaagccctattagactataggttccttgagacagagtgccacagtgctggggctgtgtctgctacgtgctgttggtgagcttgtccaagccctattaaactatgggttccttgagacagactgccacagtgctggtgctgtgtccgctgcatgctgttggtgagcttgtccaagccctattagactataggttccttgagacagagtgccacagtgctggggctgtgtctgctgcgtgctgttggtgagcttgtccaagccctattagactataggttccttgagacagagtgccacagtcctggggctgtgtccactgcatcagtgtccaagccctattagactataggttccttgagacagagtgccacagtgctggggctgtgtccactgcatcagtgtccaagccctattagactataggttccttgagacagagtgccacagtgctggggctgtgtctgctgcgtgctgttggtgagcttgtccaagccctattaaactatgggttccttgagacagactgccacagtgctggggctgtgtctgctgcgtgctgttggtgagcttgtccaagccctattagactatgggttccttgagacagagtgccacagtgctggggctgtgtccgctgcgtcagtgctcaggtctcctttgtccaaatgaaatgtgtgctgtggttttaaaaatgattctctgctctcgaactcctgacctcaggtgatccacccacctcggccagcctggccaacatggtgaaaccccctctttactaaaattacaaaaattagtcaggtgtggtggcaggtgcctataatcccagctacttgggaggctgaggcaggagaattgcttgaactcaggagtcagaggttacagggttgcagtgagccgagatggcgccactgcactccagcctgggcaatagagggaaactgtttcaaaaaaaaaaaaaaaaaaagaatctctgggctgggcgtggtggctcacactgtaatcccagcactttgggaggctgaggccggaggatcacttgaggtcaggagttcaagaccagcgtggccaacgtagtgaaacctcgtctctactaaaaatacaaaaattagccaggcatggtggcgggcgcctgtagtcccagctactcgggaggctgaggcaggagaatcacttgaacctgggaggcggagcttgcagtgagctgagatcacgccactgcactccagcctgggtgacagggcaagactccatctcaaaaacaaaaaatgaaaaataaaataaaaattaatctctgtgttatctagtagagctgtgattcgggaagagtaagaccacccaattacctttcacgtaagcagatggtattaggtcagagaagcctcacaacgcaacagagtcaggaggcagtcagctgactgggcaagtatgttagagggggaattatagaaaatgatgtattcataaaggtgttatctgaaattaaataatacaaatgtatttttattcattgatcttacgaaccacaaagggccaaggctctctctttgagttttcaattcaattaatttgacttccacgaaccacattcgtattaacagttcagtttttgctttgaatttcttcaaagagatttaagagcttaaaaaaacactttacaaccaactgggtatagactttttctagattcttacagtattttccactctataattcctcattcacacaaaattcaacatcgttaaaaaaaatttttttttttgagacagggtctcactctgtcacccaggctgaagtgcagtggcgctatcttggctcactgcaacctctgcctcccaggctcaagtgatcctcccacttcagcctcccacgtagctggggcaacaggtgcgcaccaccatgcctggctaatagtttatatttttttgtagagatggggtttcaccattttgcccaggctgctctcaaactcctgagctcaggcgatccacctgccttggcctcccaaagtgctgggattacaggtgtgagccatggtacccgtccaaaaaatcctcattttttatcacatcttttcaaagcattgagttgagtttttataaaaacattaactctctttacaaaatcatttcattggcttatacagtattttatgtttttatttaaaataacaaggggcagaaaccaatttaggaggaaacacagctgacctattaagaactatgcagctgattctttttggagcaaaagtgcacaaactagaccacagcctccactaaccacgagccctcagcgtgctgtgggcgtcaggcagaacttcttatgcaggtgacccagagcattgctgaacctggccaggtggtaaggcagtggctcccaaacttagctacacattagactcacctggagggcttttaaacgcatcccagagtgcgtgctgccctccagcccaattaaattagaaaggctgggagtgggaaccagacgtcaatatttcttgaaagattccagggtgattccaacgggcagcaaagtttgggaggaactacgacggtgcgggaaggcgagttaaaagagcttctgcatgctttctggttagcttcggattttcatcttagatttagcattaattttctatgagatcttgggtgatttatttaacttctatgagcctcagtttccttatatgtaaaatggggctaatttctgcattgtgggatattataggaattaagtgatattaggagaatttaggatttcctgctaccttccaggtgcttaataaagtgtggctcaggcgtaggagacgttattatattgtttcctgtgggtagaataaggcatgtgggtaatttggtttggtcaaagtctagacttaaaatattgcatattagaatataactaaaggattactcaaggcagactgagttgtgttcctttaaccctgcagtcttgacctcaaaatctggaaagtcagtgaggaacctgcttcttacctgctattaattatcacctattgtgttcatttgctgtgtaactacactttctccccagccgccggaagtgatggaaattcttgataatagcaagtggcctgtgctgactcaccttgtactatttcaagttaagcaccatgtgtgaaattcacaattctgtgcctacggcaactccaataggcacggagcagagagtagattttccattgtctaaatgtgactcttactttgagtcacgcaggtataattataggtattttatattatcatcctcagcacagtctaaactgtgccttttgttcttgtgttctgttttactacatgtacattatccattttattccattacatcaaatggactgttagagtcagaattggtctctgtctttgccctttaatctgtggtgcatgtggaatatctgagcttctcctgtctatataattaggctgcaaaacagatgatattttgctttaaaaataactatttccatagcacgctgctgtgacccaagcttgcagggtacaaaatagcataaaacagaagtgacacattatatcttccccttaaaggggttttactgggaatagttgaagagaaacaaaatataacatccttaatgtaaaaagttctttgccatagacgtgccagtagctggagagctggaattgcaatgctttctttaagtatttctcacctttttttctcagtactagatatggaatttgaggataggaaggggtggaggcagattagccttaggacagtggttgccgaatattttcatcctacagcatgagcagtgctgcatcagccttgtccttcgggctcttctgcagacgcgtggatgcctagatccctcccacgcaccccgagtgccacctgcaatggtccagacacacgcgggtcccacacgctctgctcgctttttgtaccaacacctttcaatcttgccccaaattacttggcctccacaacagctttgggaagtttccatctctgcctttgccattttccttctgtgcagagtagggaaaggcagagggaagagttgctgtcctggcagtaacaggaggcaggccaggtatgaggctgtaagctgggccgcctggaaagatagggatccagaggcctggaggagcagcattccgctgctgcctgggattgaggcggggggaagggagacagccaaggagtgggtgatgtacccagagacacgcctctctggaagagtggggcctggggcaaaaaggcggccttctccggctgcttcgtggagctgatggaggccgcaggatgtagttgagagctcaggtcttgcagtcagtctgtggtttgaatcctagctctactactggctgcaggatcgtgagcaagttttttttttttttttttttttttttgttgttttttaacaactttaatgagatatacctgagctacaataaactgtacatattaaatcatataacttgatgttttatcatatgtatatgcctatgaaaccgtcctcaatcaagataatgaatatattcttcacccccaaaagtttcctcgggagccttgcaatccctgcctccagctcctcttccttcctgtctccagacccaggaaccactgaactactttcagtttctagacattagtgtggatttcctagaattttatgtaaaaggaaacatatcttgcagacggtactctcgtgtgtggcttctttcacttagcataatgattttgagatgtaatcatttcattgcctgtatcaatagttcatatatttatatttctgcataatagtccactgcccagatataccacagttggccgatccattcatctcttgatggacatttctgttgtttccagtttggggatattacaaataaaagtactaaaggttgagcatccctaatctgaaaattcgaaatccgagatgctccaaatctgaaactttgtgagcgccaaatgacatcacaagtagaaaattctacatctgaccgcatgtgacaggtcacaggaaaaactttttgtgtacaaaattatcaaaaatattgtctaagattatcttcaggctgtgtatataaggtatatatgaaacataaatgaatttaatgtttacgttgggtcctatttccaagatatgtcattagatatatgcaaatactccaaaatctctggttccaagcatttcagataagggatattcagcttgtgtgagcatacatgcacaagtctttgtatggttatatggtttggctctgtcctcgcccaaatttcatgttgaattgtaattcccagtgttgggggagggacctggtgggaggtgattacatcatgaggatggatgtcccccatgctgttctcatcatagtgagttatgagatccggtggtttaagagtgtgtggtactctcccccctgctcactcgctctctctcctgctctgccatgggaagatgtgtcttccttcactgtgagtcaatgaaacctattttcctcataaattacccagtctcaggtagttatttatagcagtatgaaaacagtctaatatatatatggacatatattttctttcctttggggtaaaaacctatactagaactggaatcttatcaatgtctgggaatatttgaaaaaaaaaaaaagaaaaactggaatggctgtaccatatagtagatgtttaactttttaagaaatttctcagctgtttcccaaagtgcttgtactattttatatggggagttcccgttcctccatacccccaccagcatttggtgtggtcagtcttttaagttttgcctgtttacatagtaggtttgtaatagtgtcttgtggttttagtttgcacttcgctaatgaccaatgatgccaagcatccttctacacgcccattcggcatccatacctcttctttggtgaaatgtcccttcaaatcttctgtccttttaaaaattgttttgaaagtttttaatatattctggatgcaaatcctttataagatatagtatttgcaaatattttctctcagtctgtggcttctctcttcattctcaacagcatcttttgaaaaacaaatacttgtttttttatgaagtccaatttatatgttcttttatgaatcatgtttttgctgtcacatctaagaaatctttgcctaacccaaggccaaaaaggtttcttcttatgcctcctctagaagttttgtaattttaggcttcaaatttaggtctttgatcaatttttagttaatttttgtatattttgcaatgtatggactcaagtagtttttttcaggttgagggaggttaggtgtttttttgtgtgtgtgtatgaatatagtatccaaaatttccagtatcatttgttgtaaaaagctattatttctctactaaattacctttgtcaaggattagttggccatatttatgtgcaactatttctagactctgttctgttccattgatctatttgtctatctttacaccaataccacactgttttgattatggtggatgtataataggtcttgaaattaggtaatgttaaccttccaactttgttcttattttttaaagttgttttggctattcagtgtatttggcatttccatacaaattttagagtcgctttctaaatggattacgtagaaaaaatttctatcaaagaagtctaccaggattctgattgggattgcattgaagctatagcaacttggagatgattgacctcttcacagtattgagtgttctgacccaggagcacagtatctctctctagtttaggtttttattagttcccttcagtaattttttaaagtaggaaaaagctattatttaaacatgtatttcttttatattgatatataattacacatatttatgggtgatattttgatgcacgcatacaatgtgtgatgatcaatcagggaatttaggagattcatcacctcagttatcacttatttgtgttgggaacatttcattattttcttctagctatttgaaaatatacaataaattattgttaactatagcctcctactgtgctatcaaacactacggcttcctccttttatttaactgtgtatttgtaactgttaacccacctgttttatccccctcccccggcaccccacatcccgccccttcccacacacacacattcttcccagcctctggtatctaccattctcctctctacctgcatgagatcaactttttaagctcccacatatgagtgagaacatgcaatatttgtctttctgtgcctggcttatttgacttaacataatgacatccagttccatccattttgctacaaatgacaggatttgagtttttgtataactactagtattccattgtgtatatagagcacattttgctacaaatgacaggatttgagtttttgtataactgctagtattccattgtgtatacagagcacattttcttggtcccgttccattcatccatccattgttggacacttaggttgattctgtatcttggctgttgcgaatagagctgtgataaatataggggtacaggtatccctttgatatactgatttctgttcctttggacaaacacccagtagtgggattgctagatcatatggtagttctcgttttagtttttttttgagaagcatctatactgttttctatactggctgtactaatttacattcccaccaacagtgtgtaagagttccctttactatgcatcttcactagatttcatggtgggttttttttttctgtctttctaataatagccattctgactggggtgaaattatatctcattgtggttttgatttgcacatccctgatgattagggacattgaacattttttcacatacctggttgccatgtgtatgacttcttttgagaaatgtctattcagatcctttgcccaatttttaatgggtttgtttgggttttttgctgttttgagttccctggatattaattccttgttgaatgaacagcttgcaaatattttttttccattctgcaggttgtctctttgctctgttgattgtttccttagctgtgcagaacgtttttagtttaacatactccaatctttctaattttggttttcttacttgtgctttcaaagtcttagccataaaatctttgcctggaccaatgtcccaaagcatttcccctatgttttcatctggtagagttattgtttttggtcttaatatttaagcctttaataaattttgagtggatttttatatatggtaagagatagcggtctagtttcacccttctgcttatggatatctagttttcccagcaccatttattaaaggggatgtcctttccccaatgcatgttcttggtgcctttgtcaaaaatgagttggctgtaaatagatagatttatctgtaggttctctattgtgtcccattggtctatgtgtctttttacgtcaataccagcctgttttatgttacagtagcttcctagtagtgtattttgaagtcagctagtgtgatgcctccagcttgtttctttgttttccagtattgctttgtgtgcaaggtttttctctgtgtgtttaaattccatgaagaatgtcatggatatttcgacagagactgcattgagtctgtagattgctttgagtaggatggtcattttaacaatgttaacttgaactcaggattcagaaactcactcaaaaccacacaactacatggaaattgaacaacctgctcctgaatgagtcctgggtaaataacaaaattaagggagaaatcaatgagaacaaaaagacgatgtaccagaagctctgggacaccgctaaagcagtgttagagggaaatttatagcactaaacgcccacatcagagagctggaaagatctcagatcgacaccttaacatcacaattaaaagaactagagaagcaagagcaaacaaatccaaaagctagcagaagacaataaataagatcagagcagaactgaaggagttggagatgcgaaaaacccttcaaaatatcaatgaatccaggagccagttttttgaaaaaaaaaattaaggaaatagaccacttcactagactaataaagaagaaaaggagaagaatcaaacagacacaatagaaaatgataaaggggatatcacccctgatcccacagaaatacaaactaccatcagagaatactataaacacctctgtgcaaataaactagaaaatctagaagaaatggataaattcctggacacatacaccctcccaagactaaaccaggaagaagtcaaatccctgaatagaccaataacgagttctgaaattgaggcagtaattaatagcctaccaaccaaaaaaagtccaggaccagatggattcacagccgcattctaccagaggtacgacgaggagctagtaccattccttctgaaactattccaaacaatagaaaaagagggaatcctccctaactcattttatgaggccagcatcatcctgataccaaaacctggcagagacacaacaagaaaaaggaaacttggccgggcacggtggctcacagtggctcatgcccataaccccagcacttaggggagccaagcaggtggatcacttgaggtcaggagttcgagaccagcctgccaacatggcaaaaccctgtctctactaaaattacaaaaatagatgggcatggtggcgggtgcctgtaatcccagctaatcgggaggctgaggcaggagaatcacttgaacctgggaggcagagattgcagttagccaagatgaagtcagcttcatccctggttcaacatgcaaatcaataaacataatccatcacataaacagaaccaatgacaaaaaccacatgattatctcaatagatgcagaaaaggccttcaataaaattcaacacccttcatgcctcaataaactaggtattgatggaacgtttctcaaaataataagagctatttatgacaaacccatagccaatatcataatgggcaaaagctggaagcattccctttgaaaaccagcacaagacaaggatgccctctctcagcactcctattcaacatagtgttagaagttctggccagggcaatcagacaagaggaagaaataaagcatattcaaataggaagagaggaagtcaacttgtctctgtttgcagttgacctgattctatatttagaaaactatatcattggagcccaaaaacttcttgaactgataagcaacttcagcaaattctcaggatacaaaatcaatgcaaaaatcacaagcattcctatacaccaacaacagacaaacagagagccaaatcatgaatgaactcccattcaccatcgctacaaagagaataaaatacccaggaataccttacaaggaatgcgaaggaccccttcaaggagaactacaaacaactgctcaaggaaataagagaggacacaaacaaatggaaaaacatctcatcctcatggataggaagaatcaatatcgtgaaaatggccatactgccaaaataatttatagatccagtgctattcccatcaaactacactgacagtcttcacagaattagaaaaagctactttaaatttcatatgaaaccaaaaaagagcccatatagcaaagacaatcctaatcaaaaagaacaaagctgggaggcatcacgctacctgacttcaaactatactacaaggctacagtaaccaaaacaacatggtactggtaccaaaacagacatatagaccaatggaacagaacagagacctcagaaataacactacacatctacaacaatctgatcttcgacaaacctgacaaaaacaagcaatggagaaagaactccctatttaataaatggtactgggaaaagctagccgtatgcagaaaactaaaactggaccccttccttacaccttataaaaaaattaactcaagatggattaaagacttaaatgtaaaacccaaaaccataaaaaccctagaagaaaacctaggcactaccagccaggacataggcagaggcaaagacttcatgaagaaaacaccaaaagcaattgccaacaaaagccacaattgacaaatgggatctaattaagttaaagagctcctgcacagcaaaagaaactagcatcagagtgaacagacaacctacaaaacgggagaaagtttttgcaatctatccatctgacaagggtctaatatccagaatctacaaggaacctaaatttacaagaaaaacaaacatcaaaaagtgggcaaaggatatggagagacacttctcaaaagaagacatttatgtggccaacaaacatgaaagaaagctcaacatcactgatcattagagaaatgcaaatcaaaatgacaatgtgataccatctcatgccagtcagaatggtgattattaaaaagtcaagaaacaatagatggtggcaaggctgtggagaaatagaaacgctttcacattgttggtgggaatgtaaattagttcaacttctgtggaagacagtgtggtgattcttcaaggatctagaaccagaaataccatttgacccagcaatcccattactgggtatatacccaaaggaatataaatcattctactacaaagacacatgcacacatatatttattgcagcactatttacaatagcagagacatggaaccaacccaaatgtccatcaatgatagactgcatgaagaaaatgtaatacatatgcaccatggaatactatgcagccataaaaaagaatgagatcatgtcctttgcagggacatggatgaagctggaagccgtcatcctcagcaaactaacacaggaacagaaaaccaaacaccacacgttgtcactcataagcgggagttgaacaatgagaacacatggacacaaggaggggaacaacacacaccagggcctgtcagggggttgagggaaaggggagtgagagcattaggacaaatacctaatgcatgtggggcttaaaacctagatgacagtttgatgggtacagcaagccaccatagtacatggataactatataacaaaactgcaggttctgcacatgtatcccagaacttgaagtaaataaataaataaataaataatattaactcttctgatccatgagcatgggatgtcttttcatttttttctatgttcttcaatttttttatcagtattttgaagtttttgttatagaggtatttcacctccttacatttattcctaggtattttttagtagctacagtagatggggtagctttcttggtttctttttcaactatttgttgctggtgtgtagaaacactactgatttttgtatccagccacattaccaaatttatcagttctcagagtttttggtggaatctttaggttgttctaattattatatgccatctgcagagaggaacaatttgactttcgcttttccagtttggatgccttttatttctttctcttgcctaattgctctagctaggacttccagtactatgttgaataacagtggtggaagtgggcatccttgtcttgttccagttcttagaaaaaaaaggcttttagcttttccccacttattatgatgttagctgtgggtttgtcatatatgacctttgctatgctgaggcatgttttttctatgcctaacttattgagagtttttatcatgaaggatgttagattttatcaaatatttttcctgtgtctattgagatgatcttgttgttttagtctctcatatgttgatgtgatgtgcacgtttattgatttgcatacatcgaaccatcattgcatccctaggataaatcccacttgattatggtgtattatgttattggtgtgttgttagatttggttcgctagtattttttagatgatttttgcatctatgttcatcagggatattggtatctcattttggtattaggataatggtggcctggttgcgtgaattaggaagacttcccgcctcttcaatttttggaatagtttgagaagaattggttttactttactccttaattctactgaacttttaaagtcctgggcttttctttgttggggaactttttattactgattaattcttgttactcattatttgttcagatttttttattcttcctgatttaatcttgtaaggctgtatgtgtccaagagtttatccatttcacctgagctttccaatttgttcgtgtgtagttcttcataagactctaatcatttgtatttctgtggtatttttttcatttctcattttttaaaatttggatcttttttcttggttagtctaacagtttaatcaattttggttcctttcaaaaatcaagcttttattttcttgatcctttgtaatttttgtgtgtgtgtgtgtttatttcgtctctgatctttattctttcttctgatttttggctcagtttgctttggcttttttagttccttgagatgcatcattcggttgtctatttgaaatctttctccttttttgaggaaaacatttattactctaaacccctcttactactgcttttgttgtatcccgtaggtttaggaatggtgtttttccattttcatttgttttaagaaaaaagattttatttcattcatttaggagcatgttttcatgtaggagcatggttttaaattttcatttatttgtacagtttctaaagttcttgttattgatttcgttttactgaattgtgatctaagatgcttgatatgatttcaacttttaaaaatgtgttgagagttattttgtggtctaacacatggtctatcatggagaatattccatgtactgataataaggttgtgtattttgcagcacttgaatgaaatgctctctaaatatctgttcgatccatttggtctgtagtgcggattaagttcaatgtttctttattgattttctgtctagttgatctgtccagtgctaaagcggagtggtggaccaggaccaggcacattggctcacacctgtaatcccagcactttggaaggccaaggcgggccaatcacttgagctcaggagtttgagaccagcctgggcaacatggtgaaactctgtctctagaaaaaatacaaaaactagctgggtgtggtggcatgcacctgtagtgccagctactccggaggccaaggtggaaggatcgtttgagcctgggagattgaggctgcagtgagccaagatcacaccactgctctccagcctgggtgacagagtgagaccccataccaaaaaataataaataataaaatggagtggtggaggcctcaactattactgcattggggtcaagctctttagctctaatgataattgttttatataatatatctgggtactccagtgttgactgcatatatatttacaattgttatagtctcctgctgaattgttccctttatcattatattaatataatgaccttatttgtcactttttatgttttttggctaacattgtattttgtcttatgtaagtatagctactctggcacacttttggtttctattttcatggaataattttttccatcccttcattttcattctatgtgcatctttacaaatgaaatgcatttgttggagacagcatacagttgggtcttttttttttttttaaataaatccattcatcttgtctatattttttacttaaggaatttaaactgtttacattcaaggatgtcattgataggtaaggacttacttctgtgattttgtaaactgttttatgatggttttgtatattttttgttcctttcttcctcttgtattgcttaccttgatgatttggtagtttattgtagtgatgtttgactcctttctctttctcattcgtgtatctgctctcccagtgagtttttcagtcttgcgtattctcacggtggtagttattgtccttttgcttccagatgtagaactccctcaagcatttctcacagggcctgtctagtggtggtgaattccctccattttttcttgtttgggaaagactttacttttcattcattttttaaggatagctttcagcaatatttcatctttttttaaggatagctttcagcaatattttatggtttttatgtacacattttaatcatatctctaaatcatgtgtttgatgttgttgtaaatggtatttttaattttttttgagttggggtgacagagtgacacccaggctggattgtagaggcacagtcatagctcactgcagcctcaaatttgtagtgttcctgccacctcagcctcctgagtagctaggattataggcacatgacatcatacccagctaatttctttttgtatcatttttctgtagagatggggtctcactatgttgaccaggctggtcttgaactcctggccttaagtgatccttctgccttggcctcccaaaatgctgggattaccggtgcgaggcaccacacccagccttatgttttaatttctaattgtttgttactatgataaagaaatgcattgatttttgtccattgacctcatatcctgcaaccttcctaaactcacctattagttctagtaccttttttgtggattgcatccattagatttttctataggtgactatatcaccaatgaagatcatttgactttctttccaatctggatatcgttcatttattgtacttgccttattgtactggccaggacttccagtataatgttaaatggaaacggtgagagtggacatgcttgtcttgctcccaatcttagagggaaggcatttagtcttttaccattaagtatgatgttagctttagtttttagtagataccttttattaaattgaggatattgccttctacttatatattgctgaggattttttatcaggaatgactgaattttggtaaatgctttttctgcatctactgaaacaatcatatagttttcctttcagtttgttaatatggtaaattatattgattaggttttttttgttaatcaaccttgcattcctgaaataaacctcacttgctcatggtataaaaccctttgtatttgttgctagatacaatatttttttgagttggggtctcactctgtcacccaggctggagtgtagtggcatgatcacagctcactgcaattttaaactcctgtgctccagcaatccttccttccatctcagcctcccaactagctaggattacagtgtgcaccactgtgcccagctaattttttatactttttttgtagtgatgaggtcttgctatgttgccctggctggtcttgaacttcgggcctgaagcacctcagcctcccataatactgagattgtaggagtaagccaccatgcctagccctagatacaattttctaatatggctctttaatattttatttagaatttttttggcaatgttcatgagggatattgttctgcaggtttttgtgtttttttttttttttcaaacaacatacttgtttgcttttggtatcagattagtatagtatagcttgggaagtatttcttcctattttcaggaagactttgagtagaactgttattatttcttccttaaatggtgggtagaattcaccagtgcctccatctggtcctagagttttacctgtggaaaggttgtgaactacagattctatttctttaatgaatctagggccatttttattatctattacctcttgaaagagctttggaatttttcatctttcaagacatttttccattcttacacattgtttaatttactggcataatgtttctttattatctttttgatatctgtaggaactttagatgaggccatctcattcctgatattgatcatttgtgtctttctttttcccagatcatttgtgctagggatttacaaattttgttgatcttctcaaagaaccaacttttgattcatcgacttttctccattgtttttggttttctgtttcgttgatttctgctattttttttcctttctgctatttttttttcctttctgctattattttgtctataatttgctcatctttttctaatttcttaaggtgtaagctgagatcattgatttgaagccatggttgctttctgatataggcatttaatgctatacgtttgttttaagtacatcttcagggttattcacaaatttggatgggttgcattttcatttctattcacttaaaaagactttaaaattttcattttgaatttttccttgaccataggctgtttggggccaagttgtggagtttcagaatatttggaggtttttcagatattgttctacattgacttctaatttaattccattgtatcaggcaacatgctttgagtgacatgaatccttaacatttatttagacttgttctgtggaccagaatactgtgtatcttggtaaatgctttgtgtgcacttcaaaagaatgtgtattctgctattgttgggttgaatgttctgtgtcaagtagatatttgatagtattgttcaaatttatatccttatggttttctgtctacttgtcatatcagttttgagatgggggtatttgaaattgccaactataattaaagacttgtctgtttcttcatgcagttctaccagattgttcttcatggattagaacatgagccacataaatttttttattatgacctcttgatgaattatctcatttctcattatagaacgtttttttttttgactctaacaacatttttcatcttcagtcttttttggcatttttaaattgtgtgtcatagttgtacatatttttggagtacacatgatattttgatgcatgtatacaatgtgtagtgatcaaattaggaaaattgggatattcatcacctcaaacatttatctttgctttgtgttgggaatgtttattattaactatagttcttctactgtactattgaatactaaaactcattccttttatctaactgtatgtttgtacctgctaaccaatttctctttatcctaccctctgcccttcccttcccagcctctggtagccactcttctactctctatctccatgagatccactgttgtagctcccacatatgagtgacaacatgggatatttgtctttccatacctgacttatttcatttaacataatgacttccagcttcatccatgttgcttaaaatgacaggatttcattatttttatggctgaataatattccattgtgtgtgtgtgtgtgtgtgtgtatctatctcacattttctttattaatttacccattgatggacacttagactgattctatattttggctattgtgaatagtgctacaataaacatggtagtgcagatacctctttgatatactgatttcttttactttggatatatactcagcagtgggattgctggatcatacagtagttctacttttaagttttttgagaaacctccagaatgttttccatgatggctgtactaatttacattcccaccaagtgtatgagcattcaccatttcctgcatcctctccagcatttgttttttgtctttttgataatagccattgtaactgaggtgagatgatagctcgttatggttttgatttgcactttcctgatgattagtgatgttgaacatcttttcacatacctcttggccacttgtgtgtcttcttctgataaatgtctattcaggtcttttgctcattttaaattggattatctggggggttttggcccattgagttgtttgaattcctcatatattctggttattaatcccttgtcaaataatttgcaaatattttctcccattccatatgtaggttatcttttcactttgttgtttcctgttctgtgtagaagctttttagcttgatgtaatcccacttgtctatttttgcttttattgcctatgtttttgaggtcttaccccaaaaatattcgccaatgtcctgtagtatctccccagtgttttctcccagcagtttcatagtttcaggtttaaatttaagtccattttgagttgattttcataatgtgataaaaaatgaagctctagtttcattcttctgcatatgaatatccagttttcccagcaccatttattaaagagattgtcttttccccaatgtatgttattggtgcctttgtcaaaaatgagttggctgtaagtgcatagatttatttctgggttttctattgtattccattggtcttctatgtgtctgtttttatgccagtggtatactctttgcttactatagcttgtagtataatttgaaatcagatagtatgatgtttccagcctggttatttttggtcagtattgatttatctactacgggttttttgtgattctataagaattttaagatttcttttttctatttctgtgaagaatgtcatgagtattttgatagggattgcagtgaatctgtagattgctttgggtagtatagacattttaataatattaattcttctttgagcatgggatatttttccatttatgtgctcttcaatatctttcattggtgttttataatttttcttgtagagatctttcacttctttggttgaatttttactaggtatgtttttgtagctgttgtgattgctttcttgatttcctttcagattgatcacagatagcatatagaaatgttacacattttgcgtgtttattttatatcctgcaactttattaaactcatttatcagttctaaaagttttttggtggaatctttagatttttctaaatataagatcatgtcatctacaaacaagaataatttgacttcttcctttctaatttggatgccctttatttctttctcttgccctattgtgctggctaggaattctagtactatactgaataattacagtttatagttcaccactgagcatccttttcttattccagatcttagtgaaaggttttctattttaacctattcagtatgacataagctgtgagtgtgtaatatatgacacttatcttgttgaggtatgttccttctataaatttgttgaggattttcatcacgaagggatattgaattttactgactacctttccagcatctattgaagtaattcatatattttccttgattctgttgatgtgtgatgtattaaacttatttgacttacatatgttgaactatccttgcatcactgggatgaatcctacttgattatggtgaatggtctttttaatatattgctgtcttctgtttattggtattttgttgaggatttttccctctttttatcagaaatattgtcctgtagttttcttttgttatctttggctttggaaataaggtcagggtggccttgtagaatgagtttggaagtatttcctcctcttcaattgttaaaaatagtttgagtagaattggtattagttattctttaaatgtttggtagatttcagcagtaaatccatcagttccctggcttctctttgatgggagactttttattactgttccaatctattacttgttattggcctattcaggtttttatttcttcacagttgagttttggtaggttatatgtttccaggaatttttccattttttcctagattttccaatttattggcatatagttattcataatggtcgctaatgatcctttgtgtatctgtagtatcagttgtaatgtcatctttttcatctctgattttatttagttgggtcttctgttttttcttagtctaactgaaggttttaaaattttgttgcttttcaaaaaaacaaactttttattttgttggggttttttgtattgttattttagtctcaatttcatttatttctgctccatctttactcatttttttcctactaattttaggtttggtttgtttttccttttctagttcattgaggtgcaacattaggttgtttatatttggagtctatatttttaatgtaggtatttattgctatagaactttccattagtgctactttttctgtatcccgtgggttctggcatattgtatttccattttcatttgtttcaagaactttttaaacttcattcttaatttcttcattgacccattgatcatccaggagcatgttattcaatttccatatatttgaatagtttccaacatttcttgttatttatagttttattctgttgtggttagaaaagatacttgatatgattttgactttttaaaacttgttgagacatgttttgtggcctatcatatggtctgtcctggagaatgttccatgtactgatgagaagaatgtgtattttgtagcagttggatcaaatgttctgtgaatatctgttaggtccctttggtctagagtatagtttaattctgaggtttctttgttgatttttctgcctgaatgatccacctattgccaaaagtgaggtgttgaagtcccttactgttattgtattgtagtctacctctcctgtttagatctactaatatttgctctctctctctctctctctctatatatatatatatataccctgctatttggttatatatattcataattgttatatcctctttcagaattgactccttgctgaattattatataacaatttcctttgtttctttatatagtttttcacttaaagtctattttatctgatcgaagtatagctagtcttgatcatttttggtttccatttgtatggaatgcttttggtttccatttgcatggaatgcttttcccatcccttcactgttagtctatgtgtgtctctataggtgaagttagtttattgtaggcaacatatacttgggtcttacttattaatccattcagccactccatgtcttttatttggagaatttagtccatatacattccatgttattattgataggtaaggccttcctactgccattttattacttattttctagttgttatatagtgtacctccttacttcctttcttatttttgtggttaagtgattttctttgatagcatgttttaatttgctgcttttattttttgtttatcaattatagatttttgctttaggttaccatgaagcttacaaaaacatcctgtaattataacaagttatttaaaagtgataccaatttaacttttcattgtagcagaagaaaagaaacaaaaagaaaaaaacacatgcattttaattcccttctgttcctacattttaaatttttgatgtcacaagatcaaaatttgcctacctcaaaaattttatagttgttatttttaatagttttgtcttttaatcttcttaataaaattttaaatggtttagatgccatgattacaatataacaatcacattagcattatttttcctatgcttttaagaacttctttagcatttatcataggctaggtctggtagtgatacgttttctctggaaaactcatctctccttcatttctgaggaataactgcttggtgcagtatccttggggaacattttttttttccttcagcactttgaataatatcatctcactccctcctgacctgtaaaatttctgctgagaagtctgctgccaggtgtatttgatgtccgttgtatgttatttgcttttttcttgctctctcactgtttttaggaccctctttgcctttgacctttgtgagtttaattataatatgtcttggggtcttctcacttgggttgaatctgatcggtgacttttgacctttgtgtacctgaatatttatatttttctccaggtttggaaagttctgtgttatttctttgaataagcttgcaacttcttgtctttctcagttctctctttaattccactaacccaaatatttgctcttttgatgttggtccataggtcccataagctttgttcattccttcttattcttttttttctcttctgactgtctattttcaaatagtcttgtctttgagctcactgatcctttcttctttttgatcaattcctctgatacgctctattgcatttttcatttcatttattgaattttttacctccaggatttctgtttaattttattttttaaatcttttctgtgaactttctctgagagatttctgtgagctttcttgaagttcactgagcttccttaaaactgctattttgaattatttgtctgagagatcacatattttcatcactttagggccagtcttggtgccttactttgtccctttgacatcatatttccctgaatgttcttgacgcttgaagtatgatgatatctacacattgagagattaaatattttagtcttcctagtctggctttgtttgtgcctgtacttcttcagagggtcttccagagattctaagccaactgactattgtgttccctgtgatcaccacagtaatctcagcattagaggatactctattccctggcttgctgtgagtctcacaatggctttctggcccaaacggacctggggaagacccaatgacggtacttgtgttatgtgggaacactggccaccagggacctgagtcctgaagactgtcctagtttcccagacaagtctacttcccagcaggtctctgcacaggtaggttgtgtccccaactatagcaagaggggcagaagttgagactggaccccttcagaatctgctgtgggaaggaggctgatgggcctttctcattggctgagacaggcatgtgttactcagcaagtctctgcacaagtggagtagtttcttgcccataacaggaggagctaaagccaagactgggcctcctcagggtctgctataagatggagggtggccgggtgcctgtagtcctagctactcgggaggctgaggcaggagaatggcatgaacccaggaggcagagttttcagtgagccgtgattgcaacactgcactccagcctgggggacagagcgagactccgtctcagaaaaaaaaaaaaaaaaaaaaaaaaaaatggaggctggcatacctgccacattggctcaaatgggcatgcatcttctagtaagtccctgcatagacaggatagttccccaactatcagcaggaggagctggagcagaatctgggccctcataagatctgctgtgagacagatactgaaggggtcagtctcagctcagaggggtgtgtgtcacccagcaagttcctgtagagatagaatagttatctgattacagagagagggtctggagctgtgactgggccctcttgggatctgctgtggaatagaagctggagagcccagtcttgtatcagaaggcatgtctttcccaggaggacactgcatcaataggatagttccacgactgcagcaggaggtgctgtacatgcctctctgcgggtcttagcacaaatgggataggtctttgactgtcttcagtctcttttgtctaatattggtagatccactccagctcttatggttactgtttgccttatccacacttacacgtttaaatgattgtttatttctatttgaagtgtatttctcaagcatatagtagagcctcacttttttatccaatctgacgatttttgccttttaataagggtattttagactatttcaatttcatatgattattgatatggtttggttcaaaatattattttctgttttctatttgtcccatctgatctttgttctctctctctcttttttgctttcttttggatttatgaaacatttaaatggttccaatttccatcttctgtgggtttattagctattacttttattgtttaattattgctttagtgtttgtaatatatatgtttaagttaccacagtctaatttaaagtgatattataccacttatataaggaataaaaaccttacaatagtatacttccatttctcccgtctgacttttgtgttattgctatcaaacattttaattttacatatgtcatcattcacacgttacattatgatttttgttttaataataatcttttaaagagatttaaagtaataaaaattacatatttacccatgtggttatcatttccaaagctcttcattcctttgtctatattccttgtgtttttgcttatggtgaattcttttaggatttttaagtcaaaaaatatctttatttcccttttgttttggaatgatacttttgctgggtgtatatttctaacttgacagtttttagtactttaaaaacattgctccactgtcttctcacctgtatttccaatgagaaatctgccgtcatccttatctttgttcctttatatgtaacgtgcttttttctctctggctcttttcaagatttttctttatatcactggttttgggcggtttggttatgatgtgccttgatatagtttcttcctttgtgcttggggctcacttagcttcttggatacatgggtttatgactttcattaaatgtggggaagttttagccattatttttctcaaatattttatttgtaccacactctgtcttctcctttagggactccaattacacatagcaggcacttgaagttgtcctacagctcttttttttctgtgttttatttgttgttttttttccctatatattttattctgaatagttttattgctagatcttcaaatttgctgatttttcattctgcaatatctaatctgccattcatctcatctactatattttttttatctcacacattgtagtttttatctctagaggttcagttttgtgtctttttaaatatatattccatgtttctacttaactttttgaacatctgaaatacagttgaaataactgttttaataaatagctgcttctgtcaattctaacatctatgctagttctaggttggtttcagttatctcttcattatgggtttcattttcccgagtctttactttgtaaatattcttaagctttgttttagaatgcagttgcattacttggaaacagtttgatcatttttttgttttgcttttaatatgtgttaggtgggatcaggtcagtgttcagtctgtggctaagtatgggaaagacttctgggtattcaacccaatgccctgtgaattgtgaagttttccaggctggctgttaggaagtggcactattcctggctttgtgtgagtgctgtgcaccattatctccaatctttttaggtagttaatttctgagccttgaatagttttctcacatgaatgttgtgttagtcccttttgcattgctgtaaaagacacctgaggctgggtgatttataaagaggcttattctgctcacagttctgcaagctatacaagaagcatggcacccagcatctgcttctggtgaggactcaggaagcttacgatgatggtggaaggtgaaaggagagtaggcgtgtcacatggcaagagagagcaggagagagaagggggaaggtgccagcatcttttaaacaactagcttttgcatgaagttaaagagcaagaactcactcattaccatgggaagggcactaagctgttcatgagggatccacccccaagacccaaacacctcccaccaggccccatctccaacactgaagatcacacttcaacacgacgcctgtgattctcagtgttggaacctgctgggaggtgtttgggtcatgggggtggacgacacatctccaacattgaggatcacatttcaacatgagatttggaggacacaaacatccaaactacatcaggtgtgctgatcagtactcagctgaacacttgagggaccttctgcaaatctctagagctctctcctctgcagtactctgtcttgtaaattgttgccaccttggtctccctgtacttcagcagcagaggtattcatgggcaagttgcttaagttttctgaacagttattttctcatcaatacagaaaggataatagtatttagcttatgattctactgtgggaactgaacgaaactgatgtttgtacagcacctggcacttggcagatactcagcaaatatttgggtcttccctgtctctgcacctggtcgttacttcttcctgatttttgtcttgggtttgcaacctgattcctggctgagctttaggttggtttctgtataacgatcaaccaaagcaggtaatcactcatgagccattcaggttttaacttgatgagtttcagaattctgctattcaaatggcatttaggtagaaacgtatcctcctgtaatttgacatttattttctccaaaatctcattcagttcaacctgcaagaattatttgaattcacttatttgtagtgtgaatgtcagtaggctttagaaggtcagtggtgcgtggtggaaagaatttaagaggaccaatgctatttgcaaccccagcgtgatttttctggggtttcctagtaggtcatgaacgtcaaccttttacttccccttctcattttgcctcagatttcccaaggagctacatgaagaacagatgagtgtttgtcagaacttaaccatttctcttttatcttctcccctgtggtagtgtctggaggtcgcagccgcctgcatctcattgatctcggcagctgtgtgaaagctcttagcaaaaatcgagaaggaggctcagggctgtgtctctcgctgtctgctctgggcaatgtcatcctggctctcgtcaatggcagcaaacacattccatacaagtaagtgactcttctactcaaagaatgtggtggggtaagcatggtgtgggacgctttgttcagtgccatctgtggagaggtgtgccacagagggacagcctggaccccattataagttcagtgccagagaccagccttagctaacagttgtgtaatgcatgatctcccaaattcaaaacttttggaaatacttaaatctattccagttctaactttaggctgctcaaattagaggaaataggaaattatctcagttgaggtctccactcgcaaatgaaggtggtgggtcattgtcaccataataaagatgtgcctgtttcatagtgatgagagtgaggggtggaagactggcttatccttaggggtagggccaccagacttaaccaaaaaaatataggatatccaggcaaattcaaatttcagataaccaacaaataaggttgtattataagtatgcaccccaacattgcatgggacgctcctggtgacatgtattttatctggcaacccaatctcgggagttcagaaagctaggggagttagcacctgccttcccatgcaaatgtttagtcacttccaggatccttcctgtctctttactactgctccaattaaattacagccgctcctatgtctggcagagacaaagccactccaccaccatcaccccaactaagcgttctcattggaccgtgtggtggcaggccattgactggctgtccaggcttctgccaaggcctagctgagcctcttactagctgcatgaaccttcattcttcctaaaatgagggttaaagctatacatgttacatcacagaaatataaggctcaaaatgataaaacatgtataaaagtttattgtaggctgggtgcggtggctcatgcctgtaatcctggcactttgggaggccgaggcgggtggatcacaaggtcaggagattgagaccatcctggctaacacggtgaaaccccatctctactaaaaatacaaaaaattagctgggcgtggtggtgggcacctgtagtcccagctactcaggaggctgaggcaggagaatggcatgaaaccaggaggcggagcttgcagtgagccaagatcacgccactgcactccagcctgggcaacagagcgagactccttctcaaaaaaaaaaaaaaaaaaagaaaaaaaagaaaatttattgtagaatttaggacactatggccaataaccaatgatgaaagtctggttacacctatctagtcaagcctatcctcacctatttaaagggaaaaaacaccgaccttacagagttgccatgaggtgaagattaactaaatatatgtggattcatggttttatctgtaaaaaccctacaaaacctacgttgctgttgtgtaggaggaaaaagtcgggcagtgtattctataattactgagattcacaatgagtgctggagtttttcttcccctcagccctatgttgatgccagacccccccaccaaatacattgtgagtttatttcctaccaggagaaccattactggactgactttaggagcttaaatggtgattataatcctgtccatctcatttctagaaatttggaatcctagttggataaacccagaaatggttttcccggctcttgtaacaacccttttctatgggagaatattctgagttgaagaattatagagtttcattcgatgtcatttctgtagttgagtaaattcagcttgtggggagaaagggcaggggagggaaaccgttggagttggagatgaagggaagagtactagcactcactggtttccataaaatgagaatcatgtctgttaatgtcagaacttcatagatcatgatatagataaaattccaaattgcaccttagcaggaggtcattgattacatatcttacttatagcttttacactgtttctgcagggcgacatgcttttatgatttctataaatagttgttgaattgatggcgggaagatagatgcatgtaaacatgaaattatttttaatttaaagtaacttccttttagttagagttgggttttttataaatgagtagggaaacattaaaaattgtttttatggcccagcgtggtggctcacacctatattcctggcactttgggaggctgaggcgggaggattgcttgagaccagcctgggcagcatggcaaaaacctgtctctacaaaaaatacaaaaattaaccgggcatggtgttgcatggttgtagtcccagctacttgggaggctgaggtggaagggtggcttgagtccaggaggcagaggctgcagtgagttgagattgcgctactgcaccagcctgggcaacagagtgagaccctgtctcaaaaaaaaaaaaataaatgaaagtttgtattaatcgttcaagcttcgtgttaattaagcatatttttaacatgctggccctaccaactggctacctgccctcctgggagacatctccactcaccagtccctgcagacagctgcctgccttcattccaggagtccccttccttctattctggcaccaagagagtgatcattaaagtgtttctgtgtctcaagtaagcagactagcttccatgcagtgtcagcacaagacccaatcctggagctgtcccgtggcctggttgagctgttgatggcgtgggtacagactcaccagctgcccttgccctgccctgcctaacacaactcatcgagaccttgctgggttgcctggtgctggaaacacggtggccctggccatccagccagcgctgtccttcccaaaacatccattggccagtgcgtttgttctgtcacccctcagtgtcctaatgcccttcattgtacgtgatcttaaaaagacccttgccgaaatgttttctccgagtctggaccacggcctagattcaatatttggcatctgcaaatgtacatttacaaagtgattcatcaactagaaactgtcctcttttgaggtacaggaagataaggcaaaggtttactcaaatcacccagccagtgggtggcaggatcaaactgcctcgctcctcacagcttcagaggcctcgacagttcccagcctcactgcagacccacgcccacttctcatcaagctcccgaaatgtcggagctgccttcactgcgcacggcaggggagcccagcacagcaggaaagccccgatttctttgatcaattccgtcagtgctctgaagccacattatgcagcattttgttagcatactaaacaccttcagggtgtcaagccttgtctttgcagtgcgttccttagagaagtggaagtttcctgcccttgaggtttcctcttactcctcctgctcacttacggagggtggcggggggaacaaaaatagaaaaccaaattccatattctctttccttcccccaccccccccaaaaaacacagacaccccactacctcttcatttgtctccccagacaactctgtacttggaacctgcattacttgtgcttgctcctgggaaattcgctgcaatgtgcacagaggggctgtagcctgtcttcattcctcttcatcatcttaccaggctatttgtcatgtgagcaagctggaaagtgagtttggattcattacccatcccaggcattcccacaggcaccctccatgtgcgctgaatgcttctgactttgcaaatgatattgcccttgaagatgcaggaggcgtggagcaggtttccaacctcagccattacacagcacaggcacattacatggcacaggcttgccggccagtccaggcgccataaatcagttctcaacggtggcaccattcagaaaagcatgcagggaaggcagggagaccaccaagggctccaacccctcgtcagttctgcactgacaggctgcacaaattactctctaatttttgagagcctccacctccagggaaccctgccctcattcgatcattttgacagtgcatttgcaaattttctttattcggtacattcatttgctgttccttactgctcttgggcaccaaggtgctaggaatcttcccatttaatggataagaaaaaataggcagaagcgttgaaatgacttctcaggccaaaacccagtgttgcacatcccacaggagttggcccccagaagaaccgccacaaggatctgtcagggtgaactgagcttcggctaacgggtgttatgtcccagctcatctgaaggaccacagcttttcgagactcagattctcaccatgacccaattatctcaaaatagaatttctggttctcttagatgttgctttgtagagggcacaggcccttagaaagcacacacctgtcatgcaggcgtccttcaagccctgaagcatttaccttcattgatgactgctgctccatatggagaaagaattcctttaatgggtcatatgacctgtttgcttatttgccaacacagtgtttctaaacactctgtttctaaacaacagctagttgctaatgtcttggctgccctttaacaagagttcatggaaagtccttctgtggccctctcatgtcatgcctgtctgagatgcttctcccagtcatcttgaaaaatggtgctacataaccatcctgtcgtggaaatgatgcccggcacctccctctcacgggtttggtctatggttcagacccagacctaatccttgtttgttgagatcagtcactgagacactttgggtctcagcagctgtgctgagctcgcctcctcctctctctggtagagcctgaggcaatctgtgatccaagctgcaggccacgagcaaacaccgcaggcaacatccacttccagaaggctgtgttccacaaaagcgatgaggacacccatcctcaggggctataatgggaactcttttcctcctaaggccctagtgaggagtcaggaaccaaggtcatctttaagcttgtagcatcgggacacaccagttcattcaaagcagcaggcagcactagaagctcaagttcaaatcagtgacttgaaaggaaatgacacttcataagtagaggcagctttttcaaaatgcaagcaccttctcatccaagagagggtggggttctggcacctgtgggtcacacttgtggcagcaggcccagcattggcaggaacttcaggacgagcctctgaaggatgtggacattcccctccttgcctggagaagtgcttcctcctagagcccatggagatttgggattagcctctcctttctcagaactggaaacccagtactcaaggtctgggaagctggggaaaggggctcaagattgctgttagctagagcggggttccaaacccccaggccacagattggtacaggtccctggcttgttgggaaccagcctgcacagcaggaggtgagcagtgggggagcatgaccacctgagggctgttggctgtctgatcagtggtggcactggattctcataggaacctcatgctattgtgaactgtgtgtgcgagggatctagcctgtgcgctccttatgagaatctaatgcctgatgatctgaggtggagcagtctcatccccaaaccattccctactcccattgggtccatggagaaattgtcttccacgaaacctgtccctggtgccaaaaaggtaaaagggtttgggactgcggagccatggcattgaattcccatctcacacaggagaggaaaggctcttcctcaggacttggatgtatattacttagacgtaccatgaaattaagtagatatttgccaggaaaaatgcaaaggagtatcagttctccagatttgtttaagatagcatgaaacggagaggttcatgtaagaatctgtgtgtgtgtgtgtgtgtgtgtgtgtgtgtgtgtgtgtgtgtgagagagacatatgcatatttaacctcctttaaatgtacattaatgctgtattttctccccctgatttacagggagaatatcaatttagaactatttgcacaaactctagataccagtttagagcgttccctatttagaaataaaataaccaaagtctcaggttgccaggcaactgcagcaatgataattcttagtattgctgctttagaaatactcatttttatacattttagtgatggttaggatgcagagaatgtgagttcagaatgtcgctgggacatcgaagtcccttttctatgagatttttagcattctcacttgcttttatttttcccccttagctctgtttgcttccttggctagcggtatcttcatatttagctatagaaatctcgagagattgttattattttcttaagagttgaggcagaagctgccactacattaattctgccaggctcattatagaaccacgccagtcactcagggagaaatgacaccgtctggggatcggccggggtcacaaacactgggttcaagctttggttgttctgccgctagtttgacacatgaactctacacctcgtccttttcattcttaagaggaccacattctggcccctctcagagcttcactgaattgggaacagaatatcaggccccagctctgtcatcatctcttggcggcaaagccacggctcatgtttttgtctgtccactgcagcagccgttgtggcgtaatggcacatgatggtctcggggctgggtagaaattggaaggcgtcttcctttcccttttggcctttcaagtgtatcttcctttatgtctaatgtctggggttactattaaagtctttctgaattctgaaccaatgatcagatagatacaagagaatgattgggaatgaaaagcctgctaatcctagcagagtaggaaagggtagacagccccttccccaaccccacggcctcagtggaggagagaatggtgtggcctgcaggggagggacaggcagacagcgccagctgtcacccaggctcacgttcaccagcctcagcagtcagaccttcttccttcctcccttggaggaagtgaatagaagggcagaaccgagagcgggaactctatcttgatcttgctaaaggggtagaagttcctaattcgtggacttgctggaccacagggaggaggagaaaatgatttctagtacttatttcctggcatttcagctacatggaaggtagttagcacggtgcataaatgagcccccggtgagagtatttcccatcgtgagcaccacagccgggcgttgttctcactgtgcctcacaagctctgctaaatgccttatggatatttcattctgacaacctgtgacataggtactgtaatcatactagtatcacagatggggaaactgagacacagaaaggttgagtatcttgtccaagttcacacagctaataggcaacagggcctcactgcctcccagtttatcaccccccaccgagtacagtttctggaatattgtgctcggtcaacatttgttgcaataacaagtggggtacaacagaggatcaaacataccagcaaagcttgcatatgtgtagttgattataagtaaaagcacagtctgggcacagtggttcacacctataatctcagcactttggaaggcctaggcaggaggatcacttgagcccaggagtttgagaccagtctgaacaacataaggagacctcgtctccacaaaaaaaaattaaaacactagctgggcatggtggctcatacctgtagtccaagctacttgggaggctgaggtggaaggatcgcttgaacccaggaggttgaggctgcagtaagctatgatcgtatcactgcactccagcctggacaacagagcaagaccctgcctctaagtgagtgaatgaatgaaggcacagacccgaggggcagggctgatggtagccaattcatacattcaggtcggtctcctggtctcacctgtttctgtgattgctaagccaggctgatggctagatacccatggcaatgaagaatgtaaaatacgaaaggtaaaaaagggaaataaatcttcctttcaggacccaagctacttatcagggctaaacaaaaaataccaagtaagaatgtaatgatgaggggtggggagggggcaaaaaataaaattaaaaagaatgtaacaagcaacgagacgctcctgactttgaacctgtgtgcagggctccgggtagattagaaggcatcctaacctcagtaaatggctgtcagtggggcctgacagtctgggtcccgtgttctgggcaccaccaatggagggtatcctctcagaaagcttcaccctatttcatgagcctttaataaaatatagctataatctttctcgtgaaagagcctgacagttcatggagccacttcccacgccgcactgatgggagaaactgcaggactccaccaggctttctctggctccaggacccccacgaaggcctcctgatttatctggggcagctcctgcataagaagggtgaccgtttcccacagtggagaaccagacactgggcacagcccacttgataagacagcttccatctcccgcccctcctgggtatgcaaaggcattcctgagtgaataggttcaggtcagagcaggagaggttatcacccaggctgtgccttgaagctttgctgagtacaagaaaggtaaggaagagataagcaagaggtgagaatgacggcagggctggcaagtgagatcacgagcttttcctcaaacatctggctaagaatagaagctttgggaaattccacaactggcagattaaggtgatcagcctctcagctggaatttgtgaagtttcttcagactgagctcccagagaagtatgtgtggtggaatcgctgtgctttctaaagagatggattgcaacctgcgccgttgagctagtgctgagctgaggcccggtgagatggattctagcacccctgccacggctaacctcacacactcagacgctctccctgagcttttcatttctccatcagcaaaatctcaatcattcttactcctcgtccacctcagaaacatattgtaggttccatggagacgatgtctgtggtagacaaagagacgtgcttcaaaggcagaaaggtcactgttttatcatctttcagaatcgtgtaacccacgtggttctgccaccatcctgtcttctgtgcattccttgactttgaaagtacgcatcttttcttttgaccaagtagataattaccgtctatcgaaatgaaccctcatgcatttattcaatgagagtttgtgtgcctaacacacagcatggctgcctgatacagatacttggtttaagagaattctacaggctctgcacgaaagtgaagtcatgatgtaaggaggcaaaggactctgccctcaaacagtccaatgggcctgagaatgagcctggggtgggggttcgatgctgctgcacccccagttgtatctgtgtatcccagtgactggggcgtgatttgaatatttaaagatactcctttttcatacggcctttaaatgcaagccgagtacttctgctgcacagccggagaggtggtatgtttttaatgctggagtaaaacttgtctgtgttggacttagtgagagaatggttttcgttcagagattgtcaaggccaactttgatataaatttcactttacattttacaccacacgtgattcataacatttaactctgtcatccatagaactcggtgctgttctgatcagcaaggtagattctggcccaaaagaactggtggaggaatttaaggaactggttctaagcctaattgaggtcaccaaacatacagagaaaataatctgagaaatgtatagcagaaatctaagttttccatttattcatttactcaaaaataccctacaataaataccaggaatataacagatgatctgcattcttgggcaacttacagtgtagcaggaatacagacactgagcaccgagtaactgataatatacgcacatcagcgctgaatcggcactaagggaagaaggggtcgggtggggctgaggaatggcacagagcggtgattctcaagctctctcctcctcgagtcccactcattctctactcacgctcatctgtgtcttccaaagtttgccacagtccgtcctctaaatgcctgagtcattcacacctgttctgtcattccctgctttgatatagagatgatccaacacaaatcatgacaaaccactaagccaaatgcaagactctgaatccacagctgagtgtgatctttaatgacgactaaccatcatatcacaagttgtgtcataaccagaaacaaaacagccagagaaggagggctttaggttggtctggggacagtacggagagcccaagacgcccttgggcacccacagggggctgtgattattcaaggatggcttgatttaggcacaattaggcattggacaggatggagcatacaaatgtgttggggattaattcattaaaaatctgtcttgagctttaatagagcttcagtcagagtgtccaaccataaattctcacctgtttcacaactggttcaggcccaattgagcattaacagatttttttttttgttcatgcaaatgaggttttgtgtgtaattcattcattcatttcatttatttcatgtctaattgaacaatttttgaatagttacatttgtggagtagttaagttgtatcaaattgtctaatgtacctagtaattttgtaactaaaacagagctgaatttcattttgatataacaaaaggagaaccacagaagtagaggtggtttgaggaatagtcggcttttaagagactttatgatactctgttctttagggcaatgaccacagttgctgtttctttttatcctcacttttctttcttttcactccctaccgatgagatcaatgaaaatttggggggcatttctagatttggcagcctcccatttataagcatacatttttttagttttgtgccctgacatgcccatttttctgagggtcaaatgtgtctgtctttaaaacaccgcgttggtgtctttcaaaccacttatcaagggttgtttctcccacgagaccttgtcacccctgagcctgaaatcgcgcgctgagaactaattgcagtagctgcatacacacagtgaacaaagttcactgctcccttcattaagggcacctgccatatccactgtttccttccgagaactcttttggtgaagacgggatttttgttttctttacattccacatagctgccagaaggcccctttaaaatgcaaatctgatgtctctcagtctttaaaaccttcagtggcttcctgttggctacaggatagttgaaacccttttgtggcctatggagctcttccgaatttgggccacacctacctttctgaccatagaaactacatagagatgactgaacaccccaccccacccccacagtcacatgctttgccgatgccgattcttctgcttccagcggctgttcattcactcactcattcattcattcaatcaatagttaccaagaacataccctactccagtactgtactggagctcctcctccatttgtgagattcttcttatgtctttgacatgttttgattgtaagatgtgttgcatatgcagatgtagaaacacacctactcagtctatagaatgacaaaaaatctgtgtgcccaccacccaggttaggaaatagaacattccactagctcaggtgcccttgtgtgatcgtctgccttccgtcaccctcctgcctgttccagcggtgaccacagtgctgaattttctggttttgatccccttgcttgtcttataggttttaccacctaagtatgtgtccccccaaaacatactgtttagttttgtctgctgttgaacgttacgtaaatgaaatcatactctattctatgcccttccgtaccttcttttgatcagtatttcatttttgagatccatcttgatgcgcacagctacaggttcttaatcttcattgctgtacgatttttccattgtagatggatattgcaaaatattcttctgtgggtggatttctaacaagtttttaaaaactgattgttgaagttaatcgaacctatttctgctctaatgagatgctcacttggttcctccattaatcatttaatatggtcaattacattgtgagttttcttttctttttgagacagggtgtcactccgtcacccagactggaacgcagtgacaccaacaaggctcgctgcactcccaggctcaagtgatcctcccacctcagcctcccatgtagctgggactacaggtgtgcaccaccatgcctggctaatagtttatattttttgtagagacggggttttaccatgttgcccaggctggctttgaaatcctgagctcaagcaatcctcctgccttggcctcccaaagtgctgggattacaggtgggagccactgtacccagccaatcagttttccattaataatactaaaaattcttggattccttcctacttattctttgaggcttatctcaaatatcatctcccctctcaagccttctctgatctcctttcccccctcctaattctttgctccaggaaagttgtttccatcttccaactcaatggcattaaaatggtattttaatgtaggcacttatattttaaatatttgtttacatatacctctcctatcatatgagctcatctagataatgatagagggcacatgcagtggctcacacttgtaatcccagcacttcaggaagccaaggcaggaggatcacttgggcccaagttcaagaccagcctgggcaacatagtgagactccatctgtacaaaaaaaaaatttaaaagtatagtagccatgcatagtggcgtgtgcctgtagtcccagctactcggcaggctgaggtgggaggattgcgtgagcctgggaggttgaggctgcagtcagctatgatcatgccactacaccccagcctgggcaacagagcaagaccctgtctcaaaaaaataataatgatggaatcttgttcttcagcttccttacgattttgcactaatctgaatgaaaccagcctgatctaaaccttgcatctttagtgacagatatgagtctgacacccaccttcaactttgtggtagcctgcccagcttcccagaggacacctttgtgcccgcaggcttcctgtggccatcggatccccaatctaaactaggataaagtatatgttttgtggtattgtcacctgtttaggatgagaagaggcactgaagctataaccctattttctgagccagataaaatagcaaacatatatttgctctaccgggttattttgacaaatttatcaagcatcttcaaaatatacagtactagtctaagcattagggctaatgcagagagcttttgcaccagtaggacagaggaaaaaatgtgcacaaattagagtacaaggcataaagcagttaaaagtcacattatcaagtacattcaaggaaagaggtaagcagttccagcaagtaggccgggcgcggtggctcacacctgtaatcccagcactttgagagcccaaggagggcggatcatttgaggtgaggagtttaagaccagactgaccaacatggcaaaacccaatatctactaaaaatacaagaaaaaaaaaaaaaagccaggcgtggtggaacatgcctgtaatctcagctactcaggagcctgaggcaggcgaatcgcttgaaccccgggaggtggaggttgcagtgagccgagatcacgccattgcactccagcctgggcaacagggcgagactccatctcagaaaaaaaaagttccagcaagtcagctgtgaatattttttctatggcaataataataaacacaagatgcaggtatagattcctatttatgactacaactctccacatgtctagaatttggtggaagcaaataggtcttagaatttaccccaaagcttgaattactgaaactgcctgttagtaatagtcatttatcacatggatttggcgctggtgtcgtgaggatctaagtacagggaagttctgggcatgttcatttgccatttattaatttctgttctttgctattttttgggggggcgggtaggggagacaaaggtcttgtcacccaggctagaatgcagtgatgtggtcatagctcactgcagccttgatctcccgggctcaacagcgatcctcccacctcagcatcctgagtagctgggactacaggtgtgcaccaccatgcctggttaatttttaaaaatttttttctagagccagggtctcactgtgttgcccaggctggtcttgaattcctgagctcaagtgatcctcccatcttggcctcccaaagtgctgggattacaggcatgagccaccgcacccagccctactttgccattctttatttctcatcttaaggtggctacttagcttggcagtttccccttcttgttctgtaagcacctacgttgctctctaagtactgctttgtctgtatcctcaagttctggtaatgacaggtattttcactatcattcactcaaaatattttccatttctcattgtaattatcattttttgagacggggtctcattctgtcactgaagctggagtgtagtggtgcgatcttggctcactgcagccttgacctgctgggctcaagcaatccacctgcctcaacctcctgtagctgggactacaggcgtgtgccaccatccctggcttttcttttttcttttttttttttttggagacagagtctcactctgttgtccgggctggagtgcagtggcatgatcttggctcactgcaacctctgtcttctgggttcaagtgattctcctgcctcagccccccgagtagccgggattatttgcgcctgccaccatgcccagctaatttttgtatttttagtagagatggggttttgcatgttgccaggctggtctcaaactcctggcctccagtgatccactccctgcctcagcctcccaaagtgctggaattacaggtgtgagccactgcgcctggcccattttaattattttgtgatccgtgggttatttagaaatgtatttactaatcgccacagttacttggaatttgttccttttgagccttttaagccttgcaaaggcaggtgcagcacagcctagggctgctttgatcccactgttagcgcagtaaccttctgaggacgctgaggaatgatttacatacactcacatatatatgtacacccattatatacaccatatatattatatacaatatacacacatacccaatatgtatatacacccaatgttatatatatatatacacacccccaatatatatatacacccaatgatatatatatacacacacacccaatatatatatacacccaatgttatatatagacacacacactcaatatatatatatacacccaatgttatacatatatacacacacaccaccaatatatatacacccagtgttatatatacacacaccctatatgtatacacccaatgatatatatacacatacacacacacaatatatatacacccaatgatatatatattacacacaccatatatatatatacaccctatgatatacatacacacatacccccatatatatacacccaatgatatacatacacacactcaatatatatatacacccaatgatgtatacatacacacaccccatatatatatatactcaatgacataaataatatgcacacccaatatatatacacccaatgatatatatattacacacaccctatgatatacatacacacatacccccatatatatacacccaatgatatacatacacacactcaatatatatatatacccaatgatatatacatacacacaccccatatatatatacccaatgacataatacacacacccaatatatatatacccaatgatatatataatatacacacactatatagatacacccaatgatatatctatacacacacacacccaatatatatacacccaatgatatatatactcacacacaccctatatatatttacacacctaatgatatatacacacacaccctatatatatatacacccagtgatatatacacacacaccatatatatatacacacacatacacccagtgatatatacatacacatacccgatatatatatatatatatatacaccccatgatacatatatacacacacccaatatatatatatgtacacccaatgatatatatacacacacccccaatatatatacacacccaatgatatatatatacacacaccctatatatatatacacccaatgatatatacacagacacccaatatatatacacacccagtgatatatacacacacacacatccaatacatacatatacccaatgatacatatatatacaatatatatataaacccaatgatacatatacacacacacccaatatgcatatatacccaatgatatatatacacacacacacacacatgcatgccctgggtataaacagatctcctcactctgtctgcttgaacacagacttccaatcccttcttggcttcaaggattattccaactctcctttctgtggccttgcttgtttttttgtacacatgtggattagagctcaaccagagggctccagagagctcttgcttgctctcaggtcacctctgtctttttttttttttctctcttattctctttcccctcttctatctctccaattcttgctttgtatctctctccattcttcccttctgctattttgtcctacaaattttagctgccctgatctccccaaagtctggacttttccttgttcagaaggatgtggctgcctggctctgcttgggtcccctgtcgtgtttgggggcctggaacctctctcctggcagtaagctggggcacttacaaggctcagctcatcttttccccttctctcagacatgactttcctctgctgcttgttacccagtatcagaaacccattttttttttcttatagtttgtttggttttctagttgcttaaggttggagggtaaatccagtttctatttttcaaacatggccagaagcagaaattttgtcatttgtgatcatttttttttgtttatttctttaaacagtttaattgtctctaacatgttaatcaactttttgttgtttatttgtgatctaggtttgaacatctcattcttgcatctgtggtttctgctggctctttctcatggtgccgtgtttctttgtttatttgtgtctgggggctactcattttcactggcattttatttgtgagaattctgcaagctctgggataaagatagtttactccagacagcatttgtgtttacttctaccaggtgccagttgaggatagtctaaactacattctcagcttgaaatatttttgaccacccagatatggagaactaagcgtgcaaacctgcatgtaattcagaccagggttcgcaattctcaggacagtttctttcccctctgctcagtgcttatttcaagacagtcatgtcttgaatacctacaagggacaattattgggggttgattttcctgtgaaaattcacatgtggagcaggcctccagctttgactgctgccacataaaactcagcagggtgttacctggctgggcagatgtctttggggtgaaagaaagcttgcctgttctgcttatttatcttgagttcccaacttcacttgcttttttttggcctgaggattctttacctttttgcaggttcaacaatgcatttactaagacttaaaaataatatccacggccgggcatggtggctcacgcctgtaatcccagcattttaggaggccgaggcaggcagatcacctgaggtcgggagttcaagaccagcctgaccaacatggagaaaccctgtctcgagtaaaaatacaacattagccgggcatggtggcgggcgcctgtaatcccagcaactgaggcaggagaatcgcttgaacccgggaggtggaggttgcagtgagccgagatcacgccattgcactccagccttggcaacaagagtgaaactccatctcaaaaaaaaaaaaaatccacaacatttaactgtacttggtaagaaggttttcctaggaacccagcctatcatattgctcctttgcttttttttttctcctgttacacacctctccttcttttaaataagtaaggagatcatataacttattatcgaagccacttttgagagtgaaaagggacacttaattattattatttcatgttttgaaatattttctgacacagccgtctatattggtgaacctataaaacagttctattcaaaaattactttcaaacatgaaatgctttcttaataaaagaaaatacatcaaagtagaaaaaggttaaaactgctttatattgtttatctggacattaaaaaataagcagaataatcacttaatatacttttgtgtattttaatcattgtcttcactatcttctaataccacttcagtagtatttttcttaacactattttttctattgttaatgtcagggcgtttttctccttcacataatccaactgccttacctatatatttacatatatgtttatgtgcattaacacatcaaaccatctgtttttgataactgtggcttctgtttctcttgatagaatatcacagtttgtttaaaaataagtgtgaatttattcatacaaccaccaattacaagtttatttcagtgaaatacatttctcaattcagtgagaatattgtgtgttaaagtttcaaaggatcttcccacaagtcaatttccagagcatacttgtagaatttcacattttaatcttctatacagtttgagctcttgtcatctatatttcagggtcccctgtttgcaaattttgtttttaatcattgcaattcattacaggcttcagaggctgagctttttgtgtttcattggttgaacacttgattatggattacaacttattttgaaccacaagccatcaaaatttagatgacttgtttccaaaactggagtactttttttgtagagcatttggattgactcatgaagtatgttttaaagttaaaagctgcctaatgtcagcaatttcctatcatttcattatttcaagtgtcaaatatttctcaaatccaacttgacaggcagcaaagagagaaccgcacactctactgatgaaatgtttttaatccaatttaaacttcataaaaaatttttgtagttcagttactctcagtttatgtaaattttacacatttcaaaaactatagcttgtgcttctctgggtagaattagaactgtgtttgagctcagttatgaattacataggtacatcaattacaggtacatttcagcataataagtttctcagcttggaacattatatcttttttttattttttattttttttgagactgagtctttctccatcacccaggactgcaacctccgcttcccgagttcaagtgatcctcctgcctcagcctcccaagtagctgggactacaggcacgcaccaccatgcccagctaatttttgtatttttggtagagctggggtttcaccatgttgcccaggctggtctcaaactcctgacctccagtgatccacccgcggtcagcctcccaaagtcctggcattacaggcatgagccactgctcctggctggaacattatgtccttttttttttttttttttttgagacggagtctctctctgtcgcccaggctggagtgcagtggtgcaatctcagctcactgcacctctgcctcctgggtttaagcaattctcctccctcagcctcccaagtggctgggattacaggcaggtgccaccacacttggctaattttttttgtttttagtatagatggggtttcaccatattggccaggctggtcttgaactcctgacattatgtcttaaagtgctaactctgttcactgcacataacctcatatgttcctagatgagaccactgaaatagaaagtgaaagtctatccaattcttccatctcattttaataagtcttagtaataactacttgtattttgaataaagaaatgaaaaatccaggacaaaataaaccagacaggatgcagggtgataggcatacactgagacttctaggcaagtgagcaactggtcagccgaattaaagcccttggaggggttcctgtaccctaggttcttaatacatgcttgttgaatgaacaatcggaggtagcttatttgtttgaataaggctttctgtgtgttactgcaaaggaatgaggatgggacaggtttaggctttgtaacaagacctcccaaaggctaacacataggcggctgcttcctcggcaagcagagatgacgcttgtggccctttttgaaacaccttttttacatgccagaggtatttaacttgtccgtaccaaatggtacggacaagttaaaagggttatccgcccttttaactcaaatatcccgttgggatcaaacatttttgctctggagacctttgtacctgtgcagcatcagtataaggatagcctgggggtggtaacccagacacagctaacagcggggtctgagtggcttggccagagtcttggcctcaaattgagggcacagcagtggttctgactgttcctcttcggggaacgttgtacatcaggaggggcctgatggtaatgttggtgtaaaatgtctctgctgtgatccacccttgaagactgtgagctgtgcagaacgaagcaggtcatggcttgtcctctaggatgtgatgggaggctgaaagcatctctctgctgtgacgtaggagggaccgtgagccttatgctaggcactccttccagcccaaggcagcatcgtctactttggttttctttctttctttttttgaaacactctgcccaggctggagtgcagtggcacgatctcggctcactgcagccttaagctcctgggctcaagctatcctcctgactcagcctcccaagtagctgggacaacaggcgtgtgccaccatgcccggctacttttttaaatatttttaatagagatggggtttcgccatgtgtcccaggctggtctcaaactcctggattcagacaatctgcctgcctcggcctcccaaagtgctgggattacaggcgtgagccaccgtgcctggcctgctttggttttattctgactgtggctcctaggaagaaaaagaaaagatgatgctttggaagctgtagggttgggaagctggagacttcttgtgatggagaggtacacccagtagatacttatttaaatacttatagaaagacgactttatgccggacactgtgttaggtcctggctatacaggaagaagagaagtggcatctgcccatcctacgcagttctccaggaaggaggtggcaggagtgacatttgggccatccaggcaactcaccaagtcccttcgcagcactcctgaaaagctctgagatgttttgaagctaaaacagacaaacaaaagggaccaaagaggtggcatgagtagcatgagtcagatgtgattaattcctaattccttagctgcttctgtttgtttgttttgttttgtgtttttgagatggagtctcactctgtcacccaggctggagtgcagtgcagtggcgcaatctcagctcactgcaacttccacctcccaggttcaagcgattctcctgcctcagcctcccaggtaactgggattacaggcacacgccaccacgcttggctaatttttgtatttttagtagagacggggtttcaccatgttggtcaggctggtcttaaactcctgacctcaagtgatcagcctgcctcggcctcccaaagtgctgggtttacagatgtgagccaccaagcccggccccctatttccttatcttcttatccgcagcaggactttgagaaacggctcagttagggtcttgcagggataacagtgattagagcctgaacacaaactacatttatcccatgtcagaaatgaatagcttatcaaacgtaccaacttaaaagatgcaagaattgtgcaacaatagctaccttcttttcaaacaaaataaacatcactaaaaaactctaatcttaattctttttcaagaaatggataattcctccacatcattctcctttaaaattttgtagattctcccttaagttacttaatgtatgagttgtggcttctgtgtaacgtcttttctcaggcttgtattggtaatggaaagcattcttcagcttaatttccttttaattccttccaattactatgcactgttctttgtgccaagtgccagtccagttatccagttggtgcattttgtgagaactgtaggatcatggagatcatgtttcttttcttttcttttcttttctttttttgagacagcgtcttgctctgtcaccaggctggagtgcagtggcacaatcttggcttaccgcaacctctgcttcctgggttcaagtgattcttctgcctcagcctcccaagtagctgggattacaggcacgcaccaccatgcctggctaattttttgtagttttagtagagatggggtttcgccatgttggccaggctggtcgcgaactcccgacctcaggtgatccgcctgcctcagatcacccaaagtgctgggattacaggcatgagccactgtgcctggccaggatcatgtttctttaaaccacacatgatacccagaaggcatcataatagagttggcttcatcatcttccttatcctaggttatgcttgatttcaaaagaaatttgttcctcgacaatacacagaaaatgcacttaacaatagcccctgaagttttccccagccaatgactggttagcagtctaataaggatcatattggacaagtatctttaacacaaaacagcacagggaatcatgggccactctcatcgttaggctctcttcacaggtatagcctatgttagaaggcttctgaaccacagatgctaaagaaaaattagttaaactgaagactgatgaagtattccctacaaatgaaaaggcaatcttatatgacaaaggacactatcaggaggttgaaaaacaacctatagaatgggagaaaatatttgtaaatcatatgtctatgattaatatccagaatatataaagaactcctgtaagtcaacaaccatcaccacacccagttcacaaatgggcagaggaatcttatggacatttctccagcggagatatatgcacagccaaggagcacgtgaaaagatactcagcatcattagttgctagagaaatgcaaagcaaaccccaagaaggtaccacttcctagccagcaggatgtagctattaaaacaacaacagaaaatcagtgttggcaagggtgtggaggaattgcagtccgtgtgcgttgctggtgggaatgtaaaatggcatagtcattgtggaaaggagtgtggcagttcctccaagagtcgcatatagaattgtcacatggtccagcaattccattcctaggttacccaaaagaatggaaagcaggggagctggaggccattatgctaagtgaagtaactcaggaagggaaagccacattcctatgttctcaggtataagtgggagctaagctgagggtccacaaaggcagagtggaggaatggacattggagactccgaaggggaaaggagatggaggattaaaacgctacattttgggtacaacatatactacttcggtgacaggtgcaccacaatctcagacctcaccactatacagttcatccacgtaaccaaaaaccacttggacccctaaagctattaaataaaataaataaatataaacattcagtaacattatctttagaagaacactttttaataaacctgggcatgaagaaaaaaggctgaataatattccatcgtatgcgtgtgtatatccatatatatatatatatatatatatatatatatatatgcacacacacacacaatgtatatgtctagtgttaccaacttagtttcctttccttcaatattaaacgtctcatatttcccccagactttttgagagatagttgagaaataaagctgtgtaagtttagagtgtagtatgtgatgatttgatatatattgtgaaattattaacacaagttaggtgacacacctgtcacctgtcctagttatcatttttttttgtattgtagtgaaataaatgtctcatttaaaaaaaaaagaattgaaagcaggaaatgaaacagatacttgtataccaatgctcatagtagcattaagcataatagccaagaggtaggaacaacccaattgttcatccacaaatgaggagagaaaatgtggtatgtaaatataatggaatatacgtttcatggaaaagaatgtatctttcaatttttaatttttgtgggtacatagtaggtgaatatatctatgggatccatgagatgttgggatacagacatgcaatgtgaaataagcacgtcatggagaatggggtatccatcccctcaagcatttatcctttgagttacaaacaattcaattacactcttttaggtacttaaaaacgtacaattaagttgttatagtcaccctgttgtactttcaaatactagatcttattctttcaaaaattggttgaacctattaaccatccccacatcccccatactctcccaatacctttcccagcctctggtaaccatccttctactctctatgcccatgagttcaattgctttgatttttaggtctcacaaacaagtgagaacatgtgatgtttgtctttctgttcctggcttatttcacaaaatgatctccatttccatccatgatgttgcaaacaacaggatctcattcttttccatggctgaatagtactccattgtgtatatataccacattttctttatccattcacctgttgatggacatttaggttgcttccaaatctaatggaatatattattcactcataaaaagtgtgaaattctgatacatgctgttaatataacacggatgtaccttgcaagcatgttgagtaacataagccacaccccaaaggacaaatattgtatgattccacttatacaaggtacctggcacaggcaaattcatagagacacaaagtagaatggtggttaccgggggccgggggagtagggagtggggagttgttacttaatgggtagagtttgtttgtttgggaaggttctggagataaaggatgtgatggttgcacaacaatgtgaacgggcgcaatgccactaaactgtgcgcttagttgcaaggttacaataggacattttatgtatatttcaccacaataaaaataggaaaaggcaggtgatttctaaggacacaagtcccttggggttgctagttctgtcagacttttccccttgtttttctgaatgacaaggattagtagtggatgataatgagtggattcatggatttgagcaggacatgaaacaatttccatagacagagatgaaagggcatttctgacttgaaacctgggatgagcaccgatgcaggagaggcacgaaagctcacagcgtgttcagggcgtagtgaatagaggggtgcgtgccccgagcctgcagagcgggcagggatgtgtaggaaggcaccttcatcctcctcactcagcctcccagctccaggtccaaagccgccaaatcatctttcttgtcaccatcacatgataagggggagtccttccagactgccagtcaatgaagtaacacacacagccacggtcatgccagtctgagcccatcgggcgagccctgaggggaataacagtcttggtggcattgggcaagccccgaggactccatctcggggaataacagtcttggtggcatcggcgcttcaccaggcctcctggaaccatattcgggatccccaactgagtgctggaaagaccactggtcaggagcagggagcaggggtggaaggaggtggctcgtcctgaccttgacaatgagaatcctgttttaagcttcacgctgctgactaaacagaaaggccacggcacagggacagacgtgcgcatgaaatcacaggaagaaagacatttcacgaacaaatgcatcctcccaaaccagtctgaatccctccggacagggtgatgttaccacgcaactggcctggcctaatgagctggtttctgtcatccctcctggaaggttaccctgtaacacaaggcgtgcccactgacatgcagcctgatggagcaaggttacacctgtctgccttttgtgtgcacaagatcagaacacagtcaagtgaatacaaatgcaacagctgcttggggctcaaacttgcatagtctattttatttggatagagagcataaaattggctctaccaaagtctggaggctggaagtaatcataattgtaatctagtataattaccaagcctagacctttacctagtcctatttaacctccctttcacctttccaaggaatgtggagggataagagagtcactgaataagttggttggtaatactgtattgtatctctcaaatccattgtttttttttaaagaatgagatcaataaatataaattccaatattttcttccccaaagcaccatcttgtaccgctttggagaacattagagggactcacctgggtttccagagctggaaaacataagccccataatgcacccagtccccacggcgcgctgccatcttaggcccagtccccactgcacgctgtcatcttaggcccagtccccgctgggcgctgccatcttaggcccagtccccgctgcgcgctgccatcttaggcccagtccccgctgcgcgctgccatattaggcccagtccccgctgcgcgctgccatcttaggcccagtccccgctgcgcgctgccatcttgggcccagtccccgaggcccagtccccgctgggcgctgccatcttaggcccagtccccgctgggcgctgccatcttaggcccagtccccgctgcgcgctgccatcttaggcccagtccccgctgcgcgctgccatcttaggcccagtccccgctgcgcgctgccatcttaggcccagtccccgctgcgcgctgccatcttaggcccagtccccgctgcgcgctgccatcttagggttttgcttagggggcagatagaaaatagtaaatgaaaccctttcagatatttcctggccttatttagtaaacacgtctttttgaaagaactctgaatacacctgcagatttttcaaagcccagattctacacacttctaatgtcaaccttgaagggagatcgtagattgaattacagaaaggggtgctgtcaaaatgccacatcaaatataaacttcacatatgtttcttacctgaaacactcactcacactcatggaaaagcacaggaatgttctaaaaatgcaagtttatcacgaaggagacacaggaggttcagagacgatgaagcggcaagccgggaggaaagatctgagagaagccaccaggctggggcaggatttcattatatccagaattccacttgggctctgcagtttctttcttcctgagaattatttaaaagtccctggggaaggacaagagtaagaaaaaatcaagggagagcctctgggttactatgacaacatgactcttgaccccttctctctcacccagcagtgcctaagtcccttttgcattgctgcagagatctctggcactgtgattagcacatactcctaaacctgaggatgatttaaagtggaaggagatcaaagtttctaaatagtacaatgagctcatcttgactcaaaagatgtgtaatggttataatgcaacataactgagatgtttccttatcccccccaccagtaaagctggtcacagaccgttgcaaaggctctgtgaaaaatgacaggtctatggaaatgtctactgcaaagcactgataactcaggataatgattcaggccaaaaaaaaatttaaaaggaagtgaaacttcagacaatgtgaaacatgtcagagtcgtgtttgcattctaaattgcagtaatgatataaacatcattattcctaatctgatcctgcaggtggatcaaatacgcacacatctattaaagaacagtctgcatgctcagtaagtgcacagggtcttattaccgaatctttcagcacatcttcatttcatctttaacttcattagaatatgtaagttttggcagtctattgattcaggagaaatctatggatctattattttctatttgtctataaagtccactaattcaccttctaagttgttgttttgggttttcatcaaagtgatgacattccaactcctgattatgctacattgaataaaaataaatgtaggattttctcctttctgacctagagctaataagttgtacatattggctgagttactgcaaagaaagggcaaaatgaaaacacagctcttatagtcaaggttcttaggatcttattgagatgagctcctcagaatcagccaaacttcaaacatggagagcacggcccccagtctgccaagtcggcccaagactactgacacctactgcaagcaattagggtccaactacaaagttagcagaaagagcccacccaagaccactgtcacgtgtgacaactgcatgtttggagggttcccaaaacgaccctcaggctcgtaattctctagagggactcacagaattcacggaaaatactcatggctacaatttattatgttggaaaggagacagattaaaatcagccaaaggaagagacacatggggcagaatctaggacggtttcaaaagggacgcttccattgtcgtcaggacacattacattaccttcccggcatccgtgtgtgatggtacacgtggagcactgccaacccaggatgctcacctgagccttgtatccagagttgttactgtggtttcattacattggcatgattgattgattgatttcccatgtggtctaactcagtctccaggtggactggtactgtgtgaccccaaagcccctgccctaaatcacatggttgatccttctcttgcaaccagcttggaccatatgactatcaggtatggcccatcctaccctaagatcttatgtggccaaccctcaccataacaaaggcactcccagtgagtatgatgtagtttacctcccagaagctcatggaaaaggccacatctatctttgggaaaggtcaaattttttactacccaagcctgacctgagaagtgctaaattgtgagggtggaaaggggctagtgtgagcttggatgaacgaagtatctgaagagcaatggaaggaacatggaatgttcttaaacaacagaacatttttaggaccatagagtattggagttgaaagaatttgggagattattgcatttcttaataagagcactgccatgcagaagtggccttgtcttggtaacatgatagaagcacatgataactgtctttaaagtgtgaggggcccatgtgagcaacagggattatttttaccccatataatcctagagaacaaagccagtggccatgggttagaagttattaaaaagaagatttaagtttaatagaagaaagagctttctaataattgaggctattcagaatattacacaggctgtactgggatatggtaagttctcccaagttaaaaatattcaagcagaaagcagatcacctgttaccatggcagtgcttttattaggaaatgcaataatctcccaaattctttcaagtctaatactctgtggccctaaaaagagttttcaatcttgacagaattgtattctggaattagtggactatttctttcataagtcattatgtgaattaccttgaaaatttctaatatcgtacctgagtgccatggccttggcatgaatatacacttcctgagcagaacttaagaatgagaatatctggagtaattcaggttctgctaattctgcatggttgtcactgcgatgatgttcattgttctaggtaagaaggataaatgagtaataaaagtttcatgggacacatataagtgaactcatgttttatatccacttcagtcattcattgcaagcgagtcttgttcaatgagatcaaagcagattggttaggattttgacttgaaaccttctgttatttataaattggagttacatcatatatttcttctaaaagattctattgagactgtttgctgtctacagctggtctttctccagaagtaggttgaattgccatgaattttatcttattcagataaatagaatgctggtatctaggatccaatagattcatgtggcccaaatttcatccagacttcatcctcctctgtgtacagtggcaactattaaaatcataacagagacttgttggctccagcccatacttgcaatgtaaaacctccacttggtgcaaactctttccatccagtattttctgatgtccctgagggctctcatgaatgctcatcacacgtctcctcctggaaacaactgctgcttcaccaagaatcgcaggccccacggggaaccatcacttctctcctgcctgtcactgggcacagccaccaacattccagagccatcatggtgccagccccaaatgaccaggatggtgtcgggaagaacgcgtctctcccacgcattatcctgcctcagaggcatctcaaatgatgctgcttgcacctcagggttctacagtgtttcataaaaagagatcgatgagcaaataaatagattaacttcatgtactcttaatagttcaagacctctgccaaccagcggtctcaggataagcaagacatgacctcataataggaggtgtgctggttggatcacaaaggctggtccttcagccagagtgggtggttctctgcagggacctcttctaagctctccttgatgagacaactaatcatcgtgtacactgccgaatgacagtgtttgcagaacctctagcatgcatgctggcctcggctatctctgccaatactttattacacaagccagagtcaccttcatcggaagacttgagaacttggcttctctatcccacgaatgttatgcagtcatcttcccagcatcctgcaggacagacctgcttatgccatttgcagtacaaacaaagtactatctatctgaaattgagcagcaagtactttaacttcacgtacctctccttctgaaaatgccatcaggatagctcagcccataccaagcttctggtacttctctagtaccccaaagcaagtaattcatgccctaaggcattagcatccttgaagggaatgttgccaagacaaggccacttctgcagagcagataccttccccagaggggaggcgtccaaagtcttgcctcaaacgtaggaatgttcaggaagcagtcatggacagcgagatcatcaagtcccttaggaataagtaaactcaaataaaataaaaataaagtgattttcccttttggaggtatgtgtttcagtctggcgcaactcaacactgtcagaaataataaagacacttacttgagacctaggagaccctttggggcagaattgccctcagcagagctggtgatggtttcccttgagaacagcctttcccatgagggataaggaactgcggagatgctgctcaccttggccaggagcattgggccagggatgatggcttgggaccctggtccctggcatctcaggctggtctccaagggtcactggtgacctttcaggggacaaaagaaaaggatcttcacagatagttggctgtaaataggaaggaggcagggtcagtggtgaggaggatatttgaacagtcagcgtgtatttcaaagccgtggttctgtccccctctggtgttgcttccttctcctcttcactctgcagccgcctcttggtggtcagagggtgaatgcagggccctggggtttggggcctagggctgggagatcagagctcttggagctggcttgatacctggcaatcctcatccagcatctccatctctctacgacgcgttctggcacgttgcaggtgaagtgggtagagcgtgggatggttactggaatcgatgtagttccagggtgctgtccttaagagtgcgagtggtaccagtcagtgttctcggcatttaaatattagttgttgttatcttggctatctcatgcgtgtaagaattctgtgtgtgtagtttccatccttaaattcaaccaaggtattactgtaaaaaaaagcaagacaggcctggcacagtggctcacgcctgtaatcccagcactttgggaggccaaggagggaggatcacgaggtcaggagattgagaccatcgtggccaacatggtgaaatcccgtctctactaaaaaatacaaaaaattgctgggcgtggtggtgcatgcctgtagttccagctactcaggaggctgaggcaggggaatcgcttgaacccaggaggcggaggttgccgtgagctgagatcacactactgcactccagcccgggtgacagggcaagacttcgtctcaaaaaagaaaaaaaaaaaagcaagacaaaaactctctcccttttctagaaaagagcatgcctgtgcgtatggctggctgtgtgcctacagttcatgtgcctgtttccgtttttgctgctcaaagccatggattggtgtgtagtcaggacctgcattctctgcttggtggttcagtgtctgggatgatactgtttcccggttactctagagcagaggtcaacaaacttcttatgcaaaggagcaggtagcgagcatttttggctttgtgggcgacacaggctctgttacaaccactcaactcttattgtagcacaaaagtagccacagacactatgtaaacaaatagatgtggctgtgttttaataaaactttatttacaaaagcaggcagtgtgccagcttgggcctgcaggaccctggttggtcagccctgtgcctgagtgataacatgctctttcatgcctttaaaaatgattattaaagtgtgttcattatcctgttctttttgtcctttttcttgtttaataagtgttcactgattttaaaaagacatttttctaaaaatctgggggttttttgtgttttttttgtgtgtgtttttttttttttttttttttttttttttgacacaaggtcttgctctgtcacccaggctggagtgcagtggcgcaatctcggctcactgcaacctctgcctcctgggttcaggtgattctcctgcctcggcctcctgagaagctgggattataggcgcgcgccaccatgcccagataatttttgtatttttagtagagatggggtttcaccatgttggccaggctggtctcaaactcccgatctcaggtgatctgcccgcctcagcctctcaaagtgtggggattacaggcgtgagccacggtgcccagcataaatttattttcaaaggcaagtgtggtcagtgtaggcagggagtgaaacatgtatgcgtaaacacaactacttgaaagagcggtgcggtccttcctcaggcccccgtcagctctgctccatccccagtcccttcctgtgcctgcccaacctgtcctccatagccagggccccccaacccaaacccctccaggcaccacctccctccatccctcccgcctggctctggggagggggtggccagcggccctgcacgcttcttcctcttttctcttcctctctcttcagacttgatgcaaagagtgggctaagtctgtgctgactgttgccctggaaactcttttgaacctttctctttccctccaaagattccgagttcctcctacagtttgcagccttcagtaccctgccccttccctcccctgccctcccttacttggttgtctttattccaagttaaatgatcatcatgaggttgggaaagccgcagctttctatgcaccatgttttactccccaaaggacatcttttagagtccgcagaggcccacatgaagggctcaccagcagctctaccggtttgctttccacaaggagagctaaaatgccggttgctaagcagcatacatgccgctgcttctttccacaatgtagacttaaaaaaatcgccgtaaacattttaccatatgattgagtcaggtgtggggagtcgcagtaaacattttaccatgtgattgagtcatgggtggggagtcgcggaaatacacagggcaggcagttcgctatcacgatgttctctctcaattctgtctttggtctgtcttcctgggtaatgtcacatggagacccaggggatctgccgtcagctgtgtgcagtgggttaacaagacgacggggaacttcagagtgcaggcagtcctcatcttttgcagattctgtatttgcacattcacctactcactgaaatgcatttgtaaccccaaaatcaatacagcggtttcacagtcattctccgacacgggcagaggggtgaagatactgagtcgccagatgcacgcgttccccgccgaggtggagcgtgcaaagctctgccttcacgtttggctctcatatcgtgcacatgtgtcctttttgcagtctccttagcactgtgtttttcatatttttgtgctttctgatggttattttgctgtaaacggcccccaagaatggtgctgatgtcctatttagggtccctaagcacaggaaggctgtgatgtgccttatggagaaaatccatgtgttagacacacttctttcaggtaggagctacagtgctcatgggggtctagtgttaatgaatcaagaatacacacacccagaaaaaggaagaggaagcgcacagggcagccagcttgatgtcaccacgttacatccttttatccggtctttggtaagttttcttttcttttttttttttttgagacagagtctcgctctgtcgcccaggctgaagtgcagtggcgcgatcacggctcactgcaagctccaccccccgggttcacgccattctcctgcctcagcctcctgagtagctgggaatacaggtgcccgccaccacgcccagctaattttttgtatttttggtagagatggggtttcaccgtgttagccaggatgttcttgatctcctgacctcatgatccacccacctcggcctcccaaagtgctgggattacaggcatgagccaccgcgcccggccggtctttggtatgttttcttggggacttacacagggtcacgtggagatacagggggatgcgccttcggcccatctgtatgtggggccactctggaaagtgctaaggtaacagctatagtacatgaggaagccatggaagagatgaaaagtggctgaatgtgtggattcatcagatgatgagaacatttaatgtaatagatagcattggtgtgaggctagacaccaaagaaatgtacaatcatgttacccaagggaaggaaagtattaaacccttcttggctagtgttttattttaaagaaataccaaatataattcattattttgaagaaacgtattaaataaagcatcttattaacaaggttacgtattgaccagttgaagaaacttttgtcatcagaggttcacagaaacctaaaccatacgttaggttggtgcaaaagtaattgaaatgggccagatgcagtggctcacacctgtaatcccagcactttgggaggccgaggcgggcggatcgcctgaggtcaggagtttgagactagactggccaacatgggtgaaaccccgtctctactaaaaatacaaaaaattagctgggtgtggtggcgcgtgcctgtagtcccagctactccggaggctgaggcgggagaatcccctgaacctgggaggcggagattgcagtgagccgagatcgtgccgttgcactccagcctgggcaacagagcaagagtctgtcttaggaaaaaaagaaagaaaaaaaaagtcatcgaaatgacagaaaccgtaattacttttgcaccaaactgtatttcccctaagaacaatggcccagtatttacaaattcagtgttcacaaatattttatagaacacagctaccatgaataacaagagctgactgtatatgatcacaacctaactgagcagaactcaccctccactactcatgtaagacctgactgtatatgatcacaacctaactgagcagaactcaccctccactactcatgtaagacctgactgtatatgatcacaacctaactgagcagaactcaccctccactactcatgtaagacctgactgtatatgatcacaacctaactgagcagaactcaccctccactactcatgtaagacctgactgtatatgatcacaacctaactgagcagaactcaccctccactactcatgtaagacctgactgtatatgatcacaacctaactgagcagaactcaccctccactgcgcatattgaagacagagcccaagacgcatccaggtgcaacgtctctgctaagaatgtgtgccaggaatggggcctggcttcctcgtcgagtgcggctgtccgtgggtttctgctagacagataacgttctgaaggagttaaactttcacagctcctcctcctcctcctcctcctctatatcccttacctcgccacgttcatcactggtcattttgctggaagggaagccctggtatattcttacattgctctggaagtgagctttagcccagcgtcgccaaacttacaccttaattgatcccagatgagaaggaaaagctattgctcttaccccacagtcttccctccctgaggccagaagcaggtcacgtgtaaaatggtctgctctctgctgacagtggcctgagtctcccatagtgtctgctgagctggatagtccctctccagggagctttgcaggggatgggtgatgagacatggacatggggacgaattcctctcatctggaatcgcagacacagcatggagatatgagcacgcggcatgggaaataggcttcctcagcccttcaggatcagggaacgtgccagagatgcaatgacatttggcagcagttgagagtatgagtgctgttgatgaaataaacagaggcctttaaaagcaaggcaggaaaaatgctgggacgagtacaggaacagaaaaccagccatttctccaggtctattcaaagacgtagcaacactccctgcaaaccccagggcctcattatcaccactcagggcagtggccccgcacagcacctgcacagttgccagaggaggcctctctataggaagtgctgctttctgttgtggatagagtgactggctgggcctctctctgtgtttctcccctagtcttcaggaatatgaatgccttttccttcagtgctactaggtgcaaatatgcgagttaagggacaatgccaataaagtagccgcagtttcctggctaaaggaactgtgcaggtattaaaaacccaccgatctttaatccaggttcgtggcagggggactcctttttgttgcaagattgtctgtgtgtggaaaccctggagaaaggccacacgtgcagtcagcaagccgagtcaccaggcacagagccctttctcctgatcccctcctcttgtttctattcccaggcctcattatgtataatgtcacagacacacacgcccaggaacatcccatcacagccaggacagaagcgccaagggaggtgctttgcacagattccatcttggagttagaagcacttgctcggtgcttgccaactacaaatagccccatgctggaaaatgatgctaattagtatgccattaaaaagggtggggggaccaccacccacaacaaaatggccgtgtgcaggcctgaagccctgccctgagggccacagggaagcatggccgctaatgcagcctaattcactttgtttggcagagagagcaagctcgccatgttgctgcgggagtctctggggaacatgaactgccgtaccaccatgatcgcgcacatctcggccgcggtcgggagctacgcggagaccctgtccaccatccagattgcatcgagagtcttgaggatgaagaaaaagaagacgaaggtaaggagctcgcggggtgggggggtggtggatgagggagcctttggagccgtgccctggaacagagtcagaaaaagccaaatcaacgttgccaatcccccagcatcaggagatgtgacttggagctgacaacacgtggctcagggtccactttggggcagggaaaccttggggctgatacaaagtcatgtcacctccccacacctggtgctggccctggtcacccagcctggacccctgaccggaagcacttggtccgctttagagagtacaaatggattgctacctcaagaggaaaaacgttggagggatggaaaatattgtttttctcatgcatggcctcggtcctgcgtaggtggagactgtgtccttcgaaggcttggcaccaaagaggttctcaactccctgctctcagggcccctcccctgctgcatgtccaggagtcactccctggctgctgcttttgtcctggcaattcagtggtttctggatgatactgagtctgctggacatcgctgggctcattttctcaggcagaggccaagccaggatggtggcagggtggcaagtagttgagaaaaccatcatgatcgtggccactcagtggcaggggcagctgctgaggtgggggcctttttcccccttctctgttttgtaccttttttatctttaaatagcgtttcttaaccagagttccacggcacagggtgccaaacattggtgagccagcagcccttagctggtcaggcagggcctggatggtcaccccctttcctgagcagctgtttccccagcgtgccacacggggcttccccttcacaaatgcagtggtgatgtgacaccgggcgcgcgggcatggcaccccgagtggcccacgtgcgggaggccaacgggggtggctgtcagtagcctgtgtcgtcaggggccttcaccacttgccgcgcacagctgggctcccggggaaactgccacggaaaggccaccacattaactgccgtctcactcacagtacacatccagctcgtccggcggggagagctcctgcgaagaaggccgcatgcgcaggcccacccagctgagacccttccacaccagggccacggtggaccctgacttccccatcgctcacctgtccagcgaccccgactactcctccagcagcgagcagtcctgcgacaccgtcatctacatcgggcccaacggcacggccctctctgacaaggagctcaccgacaacgagggccccccagactttgtccctatcgtgccagccctgcagaagacccggggcgacagccggcccgcagaggcaggagaggctgcagccggcaagtcagaaagggactgcctgaagtgcaacacgtttgccgagctgcaggagaggctggactgcatcgacggcagcgaggagcccagcagctttcctttcgaagaactgcctgctcagtttgggccagagcaggcaagcagaggcccccggttaagccaagcagcgggggcaagcccactctctgagtctgataaggaagataatgggtccgaaggtcagctgaccaacagagaaggccctgaactcccagcctccaagatgcagaggagtcactcacctgtgcccgccgcggcacccgcccacagccccagcccggcctcacccaggagcgtcccgggcagcagtagccagcacagcgcctccccactcgtgcagagccccagcctccagagcagccgggagagcctcaactcctgcggcttcgtggaaggcaagcccaggcccatgggctccccccggctgggcatcgccagcctgtccaagacctcggagtacaagccacccagctctccttcccagagatgcaaagtctacacccagaagggggtcctgccgtctcccgccccactgcctccctcgagcaaggattccggcgtggcgtctagggagtccttgctgcagcccgaggtgcgtacgcccccggttggaatgagcccccaggttttgaaaaaatccatgtctgctgggagcgaagggttcccggaaactcctgtcgatgatgagcagcaggcagctactccttcagagtccaagaaggagatcctgagcaccacgatggtgacggtgcagcagccactggagctgaacggtgaggacgagctggtgttcacgctggtggaggagctgaccatcagcggggtcctggacagcggccgccccaccagcatcatcagcttcaacagcgactgctctgcacgggccctggcctcgggctcgcggcccgtcagcatcatcagcagcatcagcgaggacctggagtgctactccagcacggcccccgtctccgaggtcagcatcacacagttcttgcccctcccgaagatgagcctggatgagaaggcccaggacgcagggagcagacgctcttccatcagctcctggctgagcgagatgagcgcgggcagtgagggtgagcagtcgtgccacagtttcatagcccagacgtgttttgggcacggggaggcaatggcagaacctgtggcctcggagtttgtcagcagcctccagaacaccgctgtggtgtgcagagagaagcccaaggccagccccgacaacttgctcatcctgtctgagatgggagatgactctttcaacaaagcagcccccatcaaaggctgcaaaatatccacagtgagcaaggccatggtcaccatctccaacacggccaatctgagcagctgcgaggggtacatccccatgaagaccaatatcacagtttacccctgcattgccatgagcccccggaacatccaagagccggaggcccccaccgccacccccaaagcaggccccacattagcccagtcccgggagagtaaggaaaacagtgcaaagaaagagatgaaatttgaggacccgtggctgaaacgagaagaggaagtgaaaaaagagacggctcatcccaatgaagaagggatgatgaggtgtgagactgccacgggcccctcgaatgctgagaccagagcagagcaggagcaggacggaaagcccagtccgggagacaggctcagcagcagcagcggagaggtgtcggcctccccggtcactgacaacttcaggagggtcgtggatgggtgtgagatggccctgcccggtttggccacccagagccccgtgcatcccaacaaaagcgtcaagtccagcagccttcccagggcctttcagaaggccagccggcaggaggagccggacagcctctcctattactgcgctgctgagaccaacggggtgggtgcagcctcgggcaccccgccctccaaggctaccctggaggggaaggtggcttcccccaagcactgtgttctggctcggcccaaagggactccccctctgccccctgtccgaaagtccagcctggaccagaagaaccgggccagccctcagcacagtgccagcggcagcggcaccagcagccccctgaaccaaccagccgccttcccggcgggcctcccagacgagcctagcggcaagacgaaggacgccagcagcagcagcaagctcttcagtgccaagctggagcagctggccagcagaagcaactcgctgggcagggcgacagtcagccactacgaatgcctctccctggagcgggccgagagcctgtcctccgtgagctcccggctgcacgcgggcaaggacggcaccatgccccgcgcggggaggagcctgggccgcagcgccgggacctcgccccccagctccggggcctcgcccaaggccggccagtccaagatctccgccgtgagcagactcctcctggccagccccagagcgcgcggcccgtccgcctccaccaccaaaaccctcagcttctccaccaagtccctgccgcaggcggtgggccagggctccagctcgccccccggtgggaagcacacgccctggtccacgcagtccctcagcaggaacaggagctcgggcctggcctccaagcttcccctgcgggccgtcagcgggcgcatctcggagctgctgcagggtggcgcgggcgcccggggcttgcagctgcgggccgggcccgaggcggaggcgcgcgggggggccctggccgaggacgagcccgcggccgcgcacctgctcccgtcgccctacagcaagatcacgcccccgcggaggccccaccgctgcagcagcggccacggcagcgacaacagcagcgtgctgagcggggagctcccgccggccatggggaagacggccctgttctaccacagcggcggcagcagcggctacgagagcgtgatgcgggacagcgaggccaccggcagcgcgtcctcggcgcaggactccacgagcgagaacagcagctccgtgggcggcaggtgccggagcctcaagaccccgaagaaacgctccaatccaggtaggcggctgggcgcagggacgcgggtgaggagggcggcaggtgggcgagctgcccaaaccccactgccagggtgtcccgtgccctggggagggggcgtccaggcctggcctctccttgcaggtgggcgaactgcccaaaccccactgccagggtgtcccgtgccctggggagggggcgtccaggcctggcctctcctttcccacggcccggcaccccgcggggctccgccggggacatcaccgcggagggtttctctgtgagaaactgccctactgcgtgccgtcatcaggcttagggccgtgaatcccttggcgctcagcagggtggaaaggcgagggcccggatgcaggtggcagcatgacccgcacctgctcgctctgggggcagcctggctcttcgccgtccattccctcacccctgcccctctgttcaacaaccaaggatcctgtggacggtttacagcctgttgagggatcaggtgagggtacctaccctcatgacctggtggcttcagaagcccctcctgtgaggttggtggcctgcaagaccctggcagcctctctcagggatgtgggataacgcacagattgtcccattgaaagtggaatggcgaggcccttcctccacctccaccccaaacatatttgtggacagtcatgtttgcacacctgccacagggcctgcagtgccccccgccacacacaccatgatgcctgaaatgcgtgattttggagaaagtctttgccatttctttttttcctttttttgagacagtcttactctatcgcccaggctggagtgcaatggcgtgatcttgccaaactgcaacctctgcttcctatgttcaagtgattctcctgcttcagcctcctgagtagctgggattacaagcgtgcaccaccgtgcctggctaatttttctatctttggtagagacaaggttttaccatgttgaccaggctggtctcgaactcctgacctcaagtgatccgcccgtctcagcctcccaaagtgctgggattacaggcgtgagccaccacacccagtcagtctttgtcatttttaagaatctcctatcaaaaggcacgtactccagaataattaatatataaagcccacagacttgttaattggagtcttgggtggcacatgacagtaagttatgatgggcaaggagaagaggacccgggtcagagctggtggccctggaggtcttggggtaggagaaatgaaaggatggtaaggagagaaaaagacagacagaggcaaaagttcccaagaacaactgaagctacttgagaattttgcctggaatcatctctgctcataagtggcttccaaagaaattacccctgctcatcctttaagggcttaaaaaaaaataaatgaaatttacgcagaaccccacgtgcaattctgtggcttggttgaagccagggcggccgggttcctgccctcctggcctgtctctcccctcccgctgcccttctgtgcaacactaggctcttcacatgctctcagaagccaggtccctgcagggatccgtgcccgcagcatatgtggaagtaaaagatggggtgagacacagatgtagggcttcccctttcctactgctccagcaactgccccacaggcttgttctctgtcatggggtggcttcttcctgttctcccaccacaggcgagcacaaactctggaatgttccaaatgtaagggctgtggtcagtgaacattataaaccattcctcttcctagaatcaaagaaatccaccttaagggatggtgtagttatgcagatgtagttttatgatatagacagccccatccgctcccctcatcacagatcacagaacttggccatggggatgttaggctctaagcatggtagggaatcatcgtggctgtcagtaccttgacatctttatttgcctggggggggggtatgcttcagtctttgatacgctttgactctgctttacttcacccctcaatctcggtgacagcacttggagcagaaccccatttaagacaagttgaaaaggaagagccattccgtgtaacgtagcagcttctgtgtcttatggccagggccaagggcattgaaacgtattgatgagagtaaaaataacaagcaggaaagcatctgccggccttcccagtacctggttaatgaactcttgttattctaatccacgcagcctcggtcttcaaagtccagatgactgtgtggcatcggctgcgtggccacgtgtgtttcagtgtcccacagtgctttcatggactcaaatttagtgccttgcgtctaccagtccatttcattatttccgtggctttcacaggtttttgtttttttccccaagacttttattgtttggtttggcggttacagtggagtaaagaggaagaacaatgatggaaaaacaaacgtgtgaagtgactgcttggcgagcaggcagcaggctctgcatacgcccttgctctgggctaagtgctctcgtaaatgctgtcctctaggagcctctggttaggtaaggctattggaggaaaacagtgtaaaattaaaatgccagggcaggtgctagaaatggatttcatgtggaatgtcaagagcagaagacctttgtgatgagctgctgtagatccaggctccatgatggatgtggcagtggagatgtgctggtttcaggttaggtgaccttgtctggcttatttatgattattattaagagaaacggtggctgtcagacatggtcagcataaatcaaaagcaacttctttaagagaagctataaaactcctccaaggaaattcctaactagatggctagagtttacaattatgagaggtgtttggaaccagagaggagacatcttttgtctgagatggcttttgaatttggaatattttaatgcttatttccttagtaaaaatgaactagaattattgggaaaataaccttgacctctctgattccttggtagtacatgtaacagcagaaacgaccaaatatcaccgtggttccttcttgtcttctcattcttggaggtccatgttgctgaggagtgtgcagcattgggcttgttccaccggccatagcagggtgcagtgaattaagttagaaagcaggaggaggcttagaatcttgagctgtgtgacctttggggaataactgtcctctttgagcttcaattttctcatatgcaagtaaaacgagaagattgataggtaatagccatggtctctctgctgcccacatcatatgagactatgcagataatttaaataatgttatggtcatgtgatgtcttttccttagagcaatctgtagtcagtggggtttattttcagttgttcaacattgaccaggtatcttctgtgctcttagagcttggtgatagtttctggtgtgtgggtggaggtggaggcagccggcacaggggacaaggccactgtaagaagtttgtaatctaattggagagaaagggtgaaaagcgtggaatagagaacagtgaactgagtgcattcccagatgctgagtggggtagtgaaggcccaagtggagagagcatttagacaaagcaggatcctgcaaggcaaaggctgcagagaaatgtcgggattgagcttggtccgggagggtgcttacatcgggacaggcagagagggcgcagggcatcgaggctgaggcagggatgggactgcaaactcccagcggcaagagcctggcctgtgggcgacacagcgagattaactcaaggagggaccgtcccagcaagcagagcaagacgctagcaaacgcaagccacagtcacacccggaacaaacacaagccacagtcacacctggaacatctgggagctacaagaacagtacacattattctatattctacatagttctaaaagaatatcagtatattattgtagttggcaatggggagtcattacaggctcttgaccaacaacgtgataaggtgagagaaatgatgttgcttttattgatggattttcattgcttcatccacagctccttgccagcccctctatggtcagcaagatgaaattgtgtatagcccagagccaagaatgagcccaggagggaagggaatgtctgtcctggccagtgcacatatcagcagctgaggatgtcaatctgtgatacacagttgatgccataattacaccagctgagcccctaccctgagcccccagtcctcgcgctcccccgtcccctatcatccattatatgttatgtcaatcctattttcttcctccagtctcttaacatttcaccctcatcctggtgtgttacttccttggattctttcccttgctttccttttcttggactggatggggaagtctgacagttagatgagcaccttggtctgaattaaattcattcccaccacagggaggctcagcaccagaaaagccctggagtgagggagggtctgcctgaagagaagcccctcagggaagcatggaggttctggaatgctccagaccttggcccgcctggacatgagcaaggcctgttctgcgctcgacccagcctgcttggtgcccagcactgggctggtgcaggttactgttggatattattggttgattcattgatgggctggttgcttggttggcggcacagtcctgaaagtttactcatgtttattttctgtgtatttctcatatcttttcctgctggtgctaagtgctttaagtgttgagtctagtctgctactttgtcattctaagcgccagaccctgtgcctttctcttggtgctgagtcaacattactgactgatgggcctgtcttgtgagttgtgacttgcacctgtagtgaattgagctcccaggctaccaggttcagttcccagggcgctgcacaaaaacttgtgactaattgctcctcaccgagggcaccatggtttgctctgccaacctctcctattcgtttggttctcaggcacatcctggttttgttttaataaattcaagcagcacagtgatcactggcttaatgaaaaccagaggaaggcaagccgcttgctgtcagacttcagatttccagaatgtttctaagcgaaccaacctagagccagttgagaataggttcagaatgagagcctttttgaatacacagttgggggaaaaggaggagagtcattgattctctcagacaccaaggaagctccttagaatagaaccccaaagagagtaggtggcgctgatgctgtgagatgacactgtggtcctaggtgcggggttcggaatcgcagagaacacgggaggaagcccaggctcggcatcgaggagagctttgtggccctggagaacctgcctctttctcatccccagcacgggagcacttgccttttcagctaaaacatgacagcaggccacacagccagcatcgttcttcatcatggagctggccccttcctggtcaacaaaatcacatggattgattcacattctctttctctctctgctctgatatctacagttcctttcaacattagtgcctcgtgcttttttgactgtcttcctagtgcctactctttgaatcagaatgcagacagtgggcgatggagcgaaagccatgctggagggctctcaggagcaggagtttgggaatgggcagaagcatattccccagggggagctgagagggctcagcactcagaacacccatgtttcccaacacttaacctcagcagcagcatctgcagactcgtgtggggacttctgtctggactcagggatgttaagagtagaaggcccaatgtcagcttctcacgtgggctgtcagcaccgcagatgataccggaagatggactgtgatgggccagcgacccctctgactgcacgcagctgtcagccaggcctggaacaggaggggcgagggggtgggctcagcctctgttagtgggagaggtcctggttggaagtttcactgaagtatcagtgttgactttctcaggtcaaatctgggccatttcatgcggtaaatccatgtcggcaggtatcagcccaagtgttttgaacatgctgcacttgtacatgcctggaccaaatgccaggctgatgagcagggaggggttgaaaagcagaagggagcccaacccaccggcgtcagcaggaggctggccctggctgtggctccccgatcagacaggcggcgtccaatggggcaccacacgactcccgccagggtggggcttcccctgtacctttcttagagctgatggtcccctgaccccactcgcagcctggaaggaggggatccctggcagagaccgggcttggcagaaaactgggcatctgcttgagaggtggaaatgctggagcatgcagaaaatctaagaacccttatttatatggggccccagaccaggaccctcgggtcagtctttctttgcccagggatggcatagcagtaacatcgcttcctgtgccctttccagtaatgtgagggcaccatctccgcccctgaactcccttcaggccacttcactccatttcctcagcctgaccacattacccctgccccagtacttggcttccctcaccatcacctaagtgaagctcacatgcacctctggagggagacaggcgcggggagagggagcctcagctggaggtgcaggaactgagtatcaatccattcacgggattgaggttctggtacccaaattcagaattttacgaaaatccaagacacttgttcattcgtgtgcaggaaaaaggtattcctagcccccaaaccacacctaacctgacagtgggcactcacttcaccttgagagggatcgatgtggtgaggaagttcaaggttgctagatggcatggaaaggaggcaatgggaaggaagtagatacccgccaggatatttctgtgaagctgttgtagcccagtgaaatgtcactctccaggtgtttttaccttctctactcccagctcacacggtgccctggcacgggtattggcaggactctccaggtgtttttaccttctctactcccagctcacacggtgccctggcacgggtattggcaggactctccaggcgtttttaccttctctactcccagctcacacggtgccctggcacgggtattggcaggactctccaggtgtttttctctactcccatctcacacggtgccctggcacgggtattggcaggagatggagggtggctcttatccaagacattttcccatctgatcatatcccatccgcggtagccaggctccaagatggcccccatggtctctgcctcctggtgttcacacccttgtgtagtcccctcccgtatttaccagagttggtctctgttgagtgaggtaaggcagagtgatggtatgtcactttcaaaagtaggttataaaagacactgcaccttctgtgctgggtgcccctcttgctttcttgggtcattccctctgggggatgccagctgccatgtcataaatagtcctgtgtaggagaggcctgcatggcaatgaactaaagcctcctgccatgatgacatgagtgagcttagaaatggaagcttcaacctcagtcaagccttcagatgagtgcagccctagctgacagcttgcctgcgactccgagaggctctgagccagaaccacctggcaaaaattgctcccagattcccaacccacagggatatgtgagatcaatgtttgttgttttagccgctgggtttggggtttatttgttacacagcagccatttggaagctagagttgaggcacacagaagctaaacagtttgccaacaaacagtcagctagcttgatcagactgatttaaaagaaaaaaacccctctgatctggtcccttcccagggtaggtgtctcacgctaaggagacagacatttgctttattcccgtggtcgatgttacttagtttcgttagttggggcctgcactttgttggaaactaaatgcgattgtgtatgtgtctacacaagatcaaatctgggctctaaaaagtgaggttttggccgggcacagtggctcatgcctgtaatcccaacactttgggaggctgaggcaagtggatcatttgagatcaggcgttcgagaccagtctggccaacatcgtgaaaccctgtctctactaaaaatacaaaaaattagccgtgcgtggtagcgggcgcctgtagtcccagctacttgggaggctggggcaggagaattgattgaacccagcaggcagaggctgcagtgacctgagatcacaccactgcactccagcctgggcgacagagtgagactccctctcaaaaacagtgaggtttaatatgaagcaaaaggagctcggagcccagagttcactccatagagaaaattaacacagcagtgagtgccccttgttgtctcctggaggaggcatgcttcagctggcatctgctcatcaaaacgtcagtcccctgtaccatgcaagagtttagtctccattctgggagccatgtgcttcactaatacccagggtctcttctgctgtgaaagaaagaggatagatactgggagagaactagccgtcctcgtcacaacgtgtgaagtgtgtgaaatagtaccaggcacgtaaccagtgcatgtgagtgctactgctgctgttataagcaaataaacagtgttttctggaactcctgtaatgacatcaaatgctaggaccttttgacctatccatgctgaggatgccccctaggctgcgtgttttacaggtggaaactaggaggcggttctaaagattcctcagggagtttgctgagctaaagcccaagtgttggtttaggggagtagaggtggaggtgggtggtgggaagtgggagtgtttagccctacctcagatcctggggtgcttgtcatgacctcctctgttacatccacaaaatatttaaaagattgaaattcaggcttcagctgaatttcagggtgtagtggctcacacttgtaatcccagcacttcgggagattaaggtgggaggatcacttgaggccaggagtttgagaccagcctgggcaatatagcaagatgtcgtctctcaaaaaaaaacatttaattagctgggtgtggtggtgtgcacctgttatcccaactacttaggaggctgagacaagagaattgcttgagcccaggaattcaaggctgcagtgagctatggatcgcaccactgcactccagcctgggcaacagagcaagaccctgtctcaaaaaaacaacaaaaaaattgaaattcagaaagactaactctctgggcttatccccctcctcaggttctcagagacggaggcttatcccagcactatccctggacacctcttcccctgtgagaaaaccccccaacagcacaggcgtccgctgggtggatggccccttgcggagcagcccgaggggccttggggaaccctttgagattaaagtctatgaaatcgatgacgtggagcgcctgcagcggcgacgagggggtgccagcaaggtgaggcagcctccttcccaccccctgcctacgtggtggcagctccccaccaagcctgagcaggtgctaggcagggccctggggaagaaaactcagacccgggcttcccagcgggcttctggcatgggtggtgggaagggggcttctgtcccagcaaagggcctttggacagaggccttggagagagccccatgtttctcttcctgaaatgttttaagggcttcaaagccaggggtcgggggctggtgatcttgggggcttttctggctccttgaggctcccagtcttaaccaacctttgtccaacttgaacacccaccacctgctttctcaacttaagaatggcctgtcatagtccaaaaatggtctgtcatagtccaagaatggtctgtcatagtcctaccttgtgaggtgtctgaattgaggtctgtcaagggagaatttggtggggatgacccatgtccctcccacacgtctccaagcccagcctgttttccatcaacgatactcacaggtgctcctgtggtgtgggctgggtgtgagcagaagggccctttctcctctctgtctgtgtgctaggaggccatgtgcttcaatgcaaagctgaagattctggaacaccgccagcagaggatcgccgaggtccgcgcgaagtacgagtggctgatgaaggagctggaggcgaccaaacagtatctgatgctggatcccaacaagtggctcagtgaatgtaaggccggggtgccttcccacccttgtgactagtgggttcacctgctcaaccgggctggcgtgtagcccagggtgacagtgacacaggctgtgtcctcgtcctcagtcacaggatgcccatcaaatggaggaagttgcaccgagcgagcagccctactcccctggggatgggcgggaggggccgggacagcagaggggtggtgaatattgctcttgcaagattatttctacgtgtctcagtccaaagcacctgaaaatgagatttttccccctgcgtgtggcagaagatcacccagacatgaaggctgtattacaaatctcctaggccacaaaatcacactgcatatctagcctgaaatagacaagaatttatagagcccttaaaaaggtagagtgtacagtcctcgaaaagccacgcagagaacccagaaagcaaggaaaacatttttgagtggaaaaaaaaaaaaaaagacagccacagtgttatttccatttaatagaaagcccaggatgaccataaccatctaataacaattcaggacaattttgctctctttgaaaggtggattcaattgtcttgtcttattagttcctgaccattccatttagcacaaaataaaacttcagtctggtcccagctattacacggatataggagctaatgctggaagactcagtctgtggggtgaaatacattcctgccattcaagttccctctgcctccccttcccatccagccctcagcctccggcaggcctcctttgtacagcccctcccctgcactgccccaaccctcttccagtcttccccagccagtgtggagggcctacaggtggaggctggaagcttaggtttatgttccaaagcagctggttgaaaagatattggtgtgaaatggtcctgggtgaaggtgcggaagaaagtggcaggacttgtcagcctcccagctgtgccttccacatgtaactgcagtctcgcagcagctgcctctccacagggataaggtgataacaacatttccctaagtactcattggattcttgggacagtctgtggagcattctataatataatattaagttgcagcatttgccgctgtggccacaggcatacagacctgctttggctgctggctttctcacatactagctgtgggacctcaggtaagacacttaactctgagccttgacttccttagctgtaaaatgggaaaaataatggtgactacaccatagggcagttgtgaggtataaatcagttcccgttggtcctcttggtgcttactacactgcttggcccaggatgagagctcaggatctggtagtaattattactattatcccaaagttcaacaacaggagacatttcctggccaggcacggtggctcacgcctgtaatcccagcaccttgggaggccaaggtgggcagatcacttgagcccaggagttcaagaccagccttgacaacatggtgtgaaaccctgtctgtctctaccaaaaatacaaaaattagccgggcgtggtggcgggcacctgtaatctcagctactcaggaggctgaggttgcagtgagccagagattgcgccagaccctgtctcaaaaataaaaataaaaaacaggaggcatttccttcgtgtctgcttgcatgatgcactgaggagttggatcttctgttagaaatttgagcaaagaaagacatgaactagtcctgcgagggcctttcatcgaaggcgctaatggggagggcagacaggggcgagggcgctggttactgtctgcgcgtgacatgcgcacggggcgctgtgcttatccctccccgctgcggatacccttttccttgtttcaggaatccctggccacttcaagatcccaggggcctcctttcagtcagtcagttctctctccttcatttttgctattttcattaacattttattttcaagaactgtttatgcccaaggcagacttgacttgaaaattatcttcatcttacaaagtcagtcatatttttcccaggatgggaacaagctgaaacatcaatacatatgtgtttagatgcttccaggaaacaattgcttccttctagtctttgtacatgtcaaaaatcactgtgtttttgatgctgagaaagaaaatgaacagaaagctacatgaaaggggaaatatatattgtttcttgaagatgaattgaaaacagtaatgaaaaaaaggatcaatgagctgcctgctgactattccctgtgggcatgaggcaggggactggcatggaaagatccatttttagttctattatttcttcattctgatgccacttttaaggttgtccagtaatgtagtctgatgtggtcatagaatgatgtctccttttgcttttttgttttggtttttaaatattaaactggtattcagggccttcggtctccttccagctctagtcctggttaactgtgtcagcctcagtgagtcacgtcactgtccagctctcagggacctcatctgcagaaagaagacactctgcagacagcggccactctaagccccagtgtttccatagcacggcatcgttttcaaatcaagttcgtgttcattattatctcattttattcttcacagcaactcaaggcaggcagggcaggcagcgtaggagttactattctcacatgcctttaaagacactgtcagcagaggtggaggtcccagagctcgtctcttcagagcttgtctcgtgcctggggttccagggccatcccaccaccttggactgctgtccacgcctctcctcctcgtactgggagcctgctggacccctggacctgggccaggcagcccatccctctgcccggccacctctggacaaagcaggggacttgatgccagaggggttgatcccagatacctgctcttcaggcctggaatgatacagactttttactctgtgcaggcctgaacatcaggaaaggcatctgggttataatccagaaacgtcctttcatataaggaagcagaggtataaatgtcactcaactgagacccccaaaagggagggactctccccacctcaacttgaattatttacttgattgattgatagtgaatagtgtggtagcgtctctcaaatcctgggatccatcctggatcctccatggctggaggtagggggagctagaatgtcaccttattggtcagtagaatctcagaaaaaaccttaaggatctaaatactggtaaagagtgttcctttcaacccaaaagaggccgagaatcaggcaggagggaactctgcagtggcctaaggcaagcgaactagacctttagaccaaggggtagatgtgggggtggcagctccaggctgagccgtcgggagttgcttctcaccctgtttgctctgcgtctccatcaggctcttcctctcttgcagttgacttggagcaggtttgggagctggattccctggagtacctggaggcactggagtgtgtgacggagcgcctggagagccgtgtcaacttctgcaaggcccatctcatgatgatcacctgcttcgacatcacctccaggcgccggtagatgagccagacccttgtcctagtggtcccccgctccccaggacttcagagatgttgcacgcccctaggccctctgtgctggggcatcaaagacaatgaatgaggatgaaggttggtggcaagtctggagcgggcgttgagcggaaggcgagttttcttttgttttctgtaggaaaggtgcaaacgtcaaacaccgtggaaggagaaaaggatgggaagcccgaggggtgtccaagccctgtgagactgaaaaagcactttgaggaaccttaaagaccttgtttgtacataagaactgctagcaaaagagacctcactcttctcttgctttcgtgagaaaggaggggcgtggatgtaggattgctgtggaaagcgaacacaaaacaacccagaatgactgattaagtgccttgcaaatctttattattatccaaacatttatgttcatactttcttgtgtacagatggtgctagtcaagatgaaaacaacaaaacaaacaagaaaaacattttggaaatgtattcacagctctttttctcttggtgttttatcctatttctgacttgctgtttctaagtaagttgtgtttgtagagctatttcttaatcagtattgcttatgaataaatattacctgtcttttatggttattctggtgaggccactcaaacagagagacttccctcggcacgagccagtgtgtgtgtttccaaagtaggtttggagcagcaggtgacctcgatgccacatcccaacaagcagcgtggtcaggtagacccagaaggttgattgtggggcaggtgctttagagaacaggtgaggagacggcacctgcagcacaggggaggaggagtcctttgcgacctgggccctccctgctcctgggaggtgggccgtatgttctgtagaccgtttgcccccctcaagtcctccacacatgtggttccttgacccacaaatccacagtttgcgtggccctcaaaattcatattcatttttattccaaaaagtcttgaacgaaagctggaaccaattcaccagagccatatttctttctttagtattttctagtgttgtgttgtagattgattaaagtgggtttttccccagctgagagaccttctcaggcttgttcagagacttcaactgtattggattagaagaaggattcttgagactgtacatcttgtctgttgtccagagtacaaggatttcagctctcctgtgtcccaaagcctctatgccaagaagggacaggcttgtcctctcagtctttgctcctgcccaaaggcagagagagcttcccctccataactcacacgaccctggataggcagaacatagctgaagactatggatgtccaggtcttggctcccaacaactcaggacctcaaattcagatgttcctccctataacaattcccttaggaattatgatacccattttagtgattgatagaaacctggggtacagagtggtcaagggatttccctgataaaagctgtggtgctgatgatagtgcagcccagaatctaagagtccctgcagccttcgcatcgaggatggtacttaggcgtgtgcagagcacgcttcccttttgccctcaaatgcagcatatcttcatgagcctatttatttccaagctaggctgtctttattaaccaacaactcagccccagccactccccaagcggggaaaaaaacactacgtttcttggtcagtgtacctctggacactgcagcccacacagctggctgaactcggtaaatgggaaccgaagtcttgtgagcttcacatgacctgatcctttgttatcagaacagggttcaggtggccctgttggctcatgtgctttggaagccagctccctgggtcacgagtctggctttgcactttccataagagtctgcttctatgcaaaggtgcaaacaggagacatgcccaaatctgctggctgaacaggctaaactacagtgagaggctgctctggcatggctcgttcttccttctgtgtatct

SEQ ID NO: 306 - DNA, 107604 bp, Homo sapiens
  source 1..107604: mol_type = genomic DNA
aggaagggctggagcagttaggacagcaaaggccctggggttgggtgtgggtggtggtggtgccagctagcccctcaggcactgccctctctacaggctgcataagtgccggctctgctacaagcagcttaagagcatcagcggcctggtcaagagcaagtcaggcctgagcggccgccatggcagtaccttccgcgagctgcacctgctcatggccagtctggactgaggaaagcagtgggcaggggcgctcggcagcccacagggcctggcctcagcccccactcctgttccttgtgcacccactggcccatgagcctctgcctggcccctgctgctgtcctgtggccgtcctggaggaggtgatgctggtccctggccacctctacagccctgaactcttgagacaactctctccagcaatagctgcccagctttgcccaactgttgcttcttggggcagcgaactgagccctggggctgctgctgtaatttataaggcaaattttattaaatttgtaactattcccaggtttccttgtggggaatgttttctgctggccacagggctccccgggcccaggagtgcctgccccatggtttgagatgaggccacaccccctccaagcccgggggtggggctctgggccatgtggccagcagggggcagcagagaatcaggcctctgggacagcaccagttcagccagtgcagactgggaaggaaggggaggcggcaaccacccttccaccactgggtgttgaggttaggggtggcccccaccagcccgttcctccccacctcagctacactcaagctgtcttatggacacccccaggatgcctccaggggcaggactagaagggcacctgccccttcctctgagcagggctccgatcagctgtcactccctgctggagtccccagcactggctggcgggaaagggctccctgctccgtgggcactgcgacaggtgggccccctcctgctcccaaggcagggaccaggtacagccccgccccggggtggtcagggtcctcggcactggaggaaggtggcgtggacctctggccagttcactgaagagggaaaaggccagggcaaagagtgggcagtgggtggtgcccagcagtaacctggaagcccagcatggtttgggcaaggctttgatagcctttgaagctctctccagccttagtttccttcccatcagtaacatggaggaatgcccctgttgggaggtcagttatcgtgggcacatggtaggtaccgcatgaggcgactgtgaccacaaacaacagagaaagtgacccagggtgggacagcgcaggctccccccagttgtttgttaaggacgcatgtccctaactgacctagaggacagatcccagagggctgtggggtgaccagccagcgggggagtccacaagacctgccagtgccccgtccccctaatcagaccaagaggggctcacagaccaactttttcagaccatacttgtgtaaaaaggcttcttttattttaataagtaaaaatggctaagcttccaaaagttcttaaataggatttcagagggaagaaaattcgagagaccagcgagccaggcaggtgagcgagcagcagaatcccccacccgctggctgcctctgccagccataaacacagcacggccccgtggcgggaggccatgcgcctccgcacaccccccagctgcgggaaccctccttgaaggagaggggcggggagggctgccattggtgccaccaacccaccccagtccccatggttcttgggtctgcccagaggctcctcgcccaccccctaaggagggggctggccagctctgcaagctgaggagaggggccgagaaagcctgggtgagaggcccaccctcctccacactcccgccctcctcacggggcccagttcgctgatggcccaggcctgccaggaagagcagccacccccgcctttccgcccatgcaatttgcactcagagccacagccgagagacaccgtttccttctgaacatgtttctcatctttgaggggagacggggcagaagaagagcctccactctcgcctctacctccgggggtcctggcgctgcagcagggacaggccagtgagggcccagcttcaggcccagcggggtcacatccgtcacacaggcagtggccgcgacttccctgcaggggcatgagatcatcagcctcttgtccacttgcccaccggcagcccacagcagttgccaccgagagcaggagggaacccagcaaaagcacatagacaagcgacagcaggggctagacccagctctgaacagcagaacgtcccagcgcagccctgcaacccactgcgggcaggcaggcgggcagccctgggccacaggccccacactcacctagagactctgcagccccagccgtcaggctgaaatcaaagtgacaggcgtctcactggtgggcttgccttgggccagtaccccacaagaccctgctgctgctacccctttggactcaaggatgggccaggccctcccatgatctgggctaaacaggggctggagccctgggtcccggtcctgtggcggggctcactcctcacctaggaggtaggcaagcccggccctttctacccccggggcagctgaggcacagggagggggctgcaggggctgctctggagggggcttactgcacaggctcagccagcccatgctcagagagcagggtcccagggtagagtcagcacccccggctgagaggctggggtctccttacactgcccccttcccacagaccttccatttcccacctgcagaacggacacagcactgtctgccctgactactgcctgggggcaggggaggttgtaaaacaggttctggagaaggtgtaagaactttttaaaaaggaaagaaaagagaaagcccatccaggtaagggcagcctggtgactattaccctggggagactccccacccacactgccactccaggctcacccgagggctgcagcttcctccggatggatccagggcggctactggtcccagagctgggggctgagtgggcccgtgccgagggctgtggcgtctgacaagccggctcccactgtgagcagggaagggcggatgggcgggggccacggctgccctggctccccaccctgctgtgcttctctctactcccctgccctgcctcctaacacccagtttcctcatctgcaaaatgggcatgatgtttgtgccccagcctcagttatggcaagaattaaatgagataattcatgtaaagaagtcaactagttaccactgagcatctactatgtgccacccccacggccagctcgtcaccccacaggaacctccgaggccaagaagaaatacctgtactgaagaggctgctggctgtgggttccagccgtagctccacccaactccggcagcttccctgcccccactgcttcaggacgtccccgcccagctccctgctcctgccatgacccaaagtctctgacccagggccacctgagccaggcctgtgacagtccccgtacctctagatgctcctggcttgaccaggacccaagctctgccctgcgtagcccaggccccagctccacagagcgcaccctctcagcaaacttgagggaatagagcgtctcgctagtgttcttctccacgggggacacctaggggacacgagagctcactgcccacccgggccagctggaggggcaacagggtcacgagagggagctcacagctggggccgtcagaaggcttcctggagaggcctgagggatggggtgggagggcaggcaacatggcagaggtgctgtggtcaaaggtggagaggagggactgggagttacacagggtgtgtgtggccaggtctaggggcggggaggtccatttgcacagcctggggtgactgggtctcactgctagcgtagcccctacatgctagggactggcccgccctaacccaaggtcctcacctgtaccaccatgagggtcttgctgtcaccactaagcgaatcctgcagcaggtaggtgagcttggagttgcggaagggcacgtggccctggcgggagcgcagggcagcaatgacgtcccccagagccgacagcgacttgttgatgtgctgcgcctcccgcaggcggctgccctcggcccccgacttgcccacgcgctccgagccagccaagtccaccaggttcagcttccctgcagggaaggcacccaccagatcaggcctgccctgccccttggggttgtggggatcctcaggccaggctgcctgccactctcacccgtggtgcggaggcctgtgctgcagtccacgcctcgcaccgtcacgatgagcagcgcgtgcgagcgggagctgtgctcgttcaggttggtgaactcggtcgtgcgattagtgtggccaaactcaaacacctgggggattgggaggagggcagaggcacagcgttgagaatggggtcctcagagtcacctggccccaagcacccatgaggagtggcaccaccctccgcagtttagatgaggaaactgaggctcagagaggcgtgcggacttgcccaagggtgcgtgcttaggacacagcagagcctacattcaaacccagttgtgtcctctagagcagtgtggctgtggtcaggggctcccgcctccacaccttgttgatgtcgtccacgctctgcacttggaactcagtcagccctggtacatacagctgcccactgccgtctgggcacagccggatctccagtttttcctgaggctctttccctagcaggtccctggaggggcaggtgagacagtcaccccctcctcccatttccagctgctgtttgcactgcacccagccccccagccaggaatgttcccccaacccaggaagccttctccagccatcagctgagtgcatctctcctcctccagctcctccaccgcattcagctgaagacgtggagatctcactccacaatacaatgagcccctgttggcagggcccctagctgcccactctcacccatggccacctggtgtagcccacaggtaggggcaaggattgcctgggtctcagagagagcccctcctccccccagaaccatccaacccactgggctgagtcaggacttgcagccaggtcccttgacggcctcatctggtccctacactcccttcaccttgacggcctcatctggtccctacactcccttcaggaagaccccacttcctatcccccattgctccagcaccacccctgaggatcccaaagctgcccctgaggcctgctccccacatactgggggtcccacctgaggacctcgttccagcaccaccccggaggaccccaaagctgcccctgaggcctgctccgcacaccctggggctcccacctgaggacctcattgtagatctccgcagcgctgacggtgatggtgtactcccagtcagacgccttctcctgcacctcggagaagagcagctgcagggcccgctggttgatacctgggttctcagcggtcccctggggacagaaggaaaggccccagtaagccaggcctgtccccaaagacgctcgtgtggtgtctgtccccaaagccccttgactacccctcacaagcaagcctccttgcccaaagctcttacctacctgccactgtcccccaaaatgccctccaccagctgcgggcaactgcacctctatttccccaccattaaaatggcatcgccctgccaggactaccctgagacttatagtgcagcactgggatgaggggcctggcccagaccccacacagggcagctgagggccagatgcatgcctggccctgtggggccacctgggaggggcactggaaatgaatgaccccgccactgcccagaaaggcgctcagtctcagggaggctgagacctgggctctgtgggtggtagagaggaggcacaaggaggagcgggccagtgtcctggggaaggacgggtgggccggcctttctagaaggaaacctggagtccccacccgggacctcgaggccctgggagcctggccctcacccctcttctgatagcacctctcactcactctctattccggccacaggggcctcctggctgggcctcaggtgcccctggcatgctctggcctcttggcctcagccctgcagctccctctgccccgggtactcctctgaccgccccttggccggctccgtcatctccctcagggaggctgctcccaagatgccccctcagggaggctgctccttcgcccagcacccccaaatgccctgtccctccccctagtcagttccgcattcctggctttatttttctccctggcctgacaggacacttgctgatttgtgtagaccctgctgtctccccacagccaggttggccctgtggggagggccctctgtgggggcagggactgtttgggtcacagctgtgcctggcacgatgcctgatacaccttatgcatcagcagatacacttgaggatgaacgctctgatgttcctggtggtcacctcaacactaagcaatcccaaagcagagcggggagcccagaggatgccgcacacatccccttcctcctcctgcctggcctggcctgcccccactaactagtctcaccagtcccagaatcgagggaacagcagagtccagatgggaaataagagggccgcccagcaggcctggctagccccttcccctgtccagacgccacaccacctggcctcctcctgacctagggaatcaatcccacagcacccctcagagccagggctagctttccactgccctctgcccacagtcaagatccttcctagtctcaacgcccctctccctggcctgccacctgctccaccacacctgggagggtgccggtgacgagcagggagaggaagccttggcctggccccagggaccaccggcaagagctgggctccccacaacagccttcatatgccagtcttgccctgggatctccttgaggactgagacccgccactcatcccagatcccccaggcccggcccaaggcagcggtaaagcaggagtgtgcagtgcacactcaaggtgaaatgcagccctggtcctgagagaggtcggtggcctgccccagactctgtccccaagccgagatccctgtgatgatagtccccccttgcctctctcccagtcctgctgggcccattgtgggtgcccttgggcaagggggccccctcttaaggcctggtgcctcagggctaacacagataactacagcctctgctcctgggttgtgaggaccaaatgaggcaaaacacacactgcacaataccccaagaccaatgagggagcccgcattcccttcatgcttcactgtgaacccccaccccattgggcagcacccacctccatcgtgtacgtcttgccggcgcccgtctggccgtacgcaaagatgcagacattgaagccatcaatgcaagaggtgaccagggcctgcacctcctggaacacctgggagggtggtgggagggaggctggtgggggggcttccagggccgctgggaccaccagctacaagtccagccacctccccaaccatgctgtccttcagcaacaccacatcacgtgttactgcagtcactcagctcacaatgattcgtgactcatgagtcatacattagacagtagtgggcaaccgggccgcccaaagactgcagggaagacaggccagtgcctgctgcccttcccccagctcctcctgctctctctcaaagagtgctcagcacaaggaaggtggaggccagcacatgcctggggcctctctggcctgggcctgcctgccagccatcagaggatgggggcaaagatagaaccagacatgagaacaggagggcacaggcctggcagggctggcaggttggtctgggcagagataagggaagagtggacactgagaacacatggttctcatacagcctcagggggttgggggattcctaggaaggcccaggggactgatacaggagggtattcccggatggggaagatgggcagggtcatgaagatggatggggccatgtgggtggccatgggggtgggaggggctgtgatggtgggaggggcctgaaagtgggtgaggccacatggtgggaagatgggaggggcctgagggtgggtggggccatgcagatgggaggagccacagcatgagggtgggatgggctgtgatggtaggaggggccttgggagtgggcagggccatgcagtggaaggggccacctgaatgggaggacccaaagccatggtggtgggaggggctgtgggtgaggccatgtggtggaaggggctgtggatataggaggggccacatggtgggaggagccacagctgagagaatggaatgagttacgatagtgggaagggcctcaagggtgggcggggccacacggtagaaggggccttggggacgggaggaaccacagccatgggaggggatgggctgtgtctggatctctccttcctaaggaggctttcaagggcttcagtcttaacttcccaccctcttctgtcctccagaggaaggagcaggaccctggctccccacttctgattcctgcaccccccactcttaacgcttcttcctgcccagcgcccccgctccctgtgagtccatctttccctctctcccttgctttccctttcccgcatggggccacactcacgtcctgctgcgaggcctgtggggagaagaccttgtccagctcgaaggacacaggcttgcccttgtgcagcaggtggatgatggagtcgtcgtcggcatcgaaagtcacagcattggtggcctcaggtccttccccatcctctttggtgactggccggacacgagcaatcactcggatgttccctggattggttggggatggggaaatgggtccaggccatgtcaagaccagtctccattctggtccactggtgtcccaggcagactagttgacctaggagtcccctgacttttaagcacagccccctaggggaagggggcccacaaagctgttatccgtcattcacactatagtatgaattcacttagtacatttcttcttgaacagaccagttgactggggtggagctctgccttggggatggggaggaaaggtcagttgtggggctcaagcactgcaccccgtcagggtgagacaccagaacggacactctttttctccctggacttcagtttcttcatccagacaatgaggggcttgggccccaatgagcaaagagccttgtcctgaatggcaggacagggcttaggaatcagatgggcatataggcccaggcagcaggtgatgactggtggtgtatctgagggcccagatagtggggcagccacaggggtatctggcagcatgagctggtcatgccgccatctacttccagcctttgttgggatccctgtgctcttggaatgaagaggaaacaccccccactgccagcatggcccacctgccctcccttttcacccatccgttccagctcactgtccaggtctcagctctaactttgccttctctgggaagcccctcaacacacttgcctgtcccatacccaggaaagcctgtctcagccctggaagggggcagggttggggttccctgacaatcatcattgttgattctcacactaaagtgtgcaccgggaggcagtctgtggggccacgaccatagcctcgggctggaacggcacctggcacagagcaggcactctagagctccatgcagtgaatggtggagtctcaagcttgaccaggccccaggtcagaataagcggctttccagctgccaccaacccaatgctgcaacaccacacccctcggctacccagggcctggggagtcacctgcccaggcactggggccagggcttctgagctggacagactcaagttcaaatccaaggcagaccatttaatatccatgtggctttgagcaagttccctgccttctctgtgcctctgtttccttatctacagagataggattagaatagtgcctcaatggtggggtgagctccaagcatgactgccaagccaggtcgaggaccccgaggccagcgcccacccccagccctcctgcagtcacctttcagccgcacgagctcattgtggcacttcttacgcagctgcagctcgcggcggtacttgcgcagcagctcctggttgttgctgttgacctcctcgatggcctggcctatctggtggggggtgcacaccactgtcagggggacggctccatcagccttaccggcctgactgcccacccctgaggggtgctcactgcctcctgcccctggctgagtacctgacacacgctgtcacatgtcagactgtcccaatcacccctctgggtaggtactgctaccatccccattttacagatgatgaaactgagccgcagacactaagctgacagcttgaggctgctctgctaataagcatagagccaggactcagccctccacaccacagcactagtgcttgactatgtgattcagccagactcaaattccaactctgcccctgagtagctggggacctgagaccactggctcaatgtctttaagcctcaattttctcatctggaaagcagggataataccatctaactcatgaatctgtaaagatctcccagttacatttcacaggtagaaaaaagatgcaaaatcacacatacagtatcacactgtacacaaatcacacatcccctttctggagtagaagggaagtgtatacagtgtatacagtcttcccttagtaaccgtggaggatacaaaaatccacagatgctcaagcccctgatataaaatgatatagtgtttgcctataacctacacacatcctcccatatactttattttttttgagacagggtcttgctctgttgcccaggctggaagtgcaatcacagctccatggatgtggtggaaactcattgtgagtggtgttatcttggctcactgcagccttgacctcccagacccaagcaatcctcccacctcagcctcccgagtagctgggactacaggtgcaggcaaccacactcagctagtttttttatatttttttgtagagatggggtcccactatgttgccgaagctggtcttgaactcctgggctcaagtgctcctcctgcctcagcctcccaaagtgttgggattacaggtgtgagccactgtgcccagcccctcccatgtactttaaatcatctccaggttacttataatatctaatacaatgaaaatgctgggtaggggctgggtgcagtggctcatgccggtaatgccagcactttgggaggcggaggtgggcggatcacctgaggtcaggagttcaaaaccagcctggccaacatggtgaagcccagcctctattaaaaatacaaaacaaacaaacaaacaaacaaaactagcccggcatggtggcacacgcctgtaatcccagctatccaggaggctgaggcaggagggtcgcttgaacccgggaggtgggggttgcagtaagctgagatcccgccattgcactccagcctgggcaacaagagtgaaacactgtctcaaaaacaaaaaaatgctgtgtaaatagttgttatatgttattttttatttctattatttctaattgttgtactgttaatttttttcaactatttttgatctgtggttgtttgaatctgggaatgcagaacctgtggatgggggaagggcctaccatatattctcacacacacacacacacacacacacacgcacaattggcttaagcatgctcagaacagtcgggggaaatgctgagaggccacattggaagagttgggtgggtggcagagaggcctttcctattcacctgatgccctgctatggagtttgacttttcaccacgtccatgtattactgatatagtcttttaaaggagaagaactatattctgttcccaaaatatattagtctttgcaaagctatcatacaaattcaaggagctaacggctataaacagctcgacatgtaggaggcacttaagaggcactggttattctcatatgtacaagtacagcttgaaagaattaagttaaacctaacagaggtaagactgtatcggccagtcatggtggctcacaccaataatctcagcactgcgggaggccaaggcaggaggactgcttgaagccaggagttcaagaccagcctcggcaacataatgaaccctgtctctaataaataatttttttaaaaaatacgtatgtagcatgttttttgtttgtttttgagataaagtctcgctgtcacacaggctgaagtgcagtggcatgatcttggttcaccgcaacctccgccttctgggttcaagtgattctcctgcctcagcctcccgagtagctggaattaacaggcacctgccacccatgcccagctaatttttgtaattttagtagagacgaagtttcgccttgttggccaggctggtctcaaactcctgacctcaagtgatccgcctgcctcggcctcccaaagtgttggaattacaggtgtgagccaccgcgcctggcctgcatgtttgaaatatgaagttatctgtaacatgtttggtttaaagaatcatagtaagacaaatagccgaatgcctgccctgagcagtctagtttcaaacagggcctataagggcagcagtaagtgtcatggggggtggggcaggggctgctgtctgagcggctttgtctgagctttggagggacgccctgagtggatgtcgtgcctctcccagtgcacccccttagcctggaccctcccacccactgccctcgctcacctcggccttgacactcctgagggcctcctgcagcagcagtgggaagccgcgcacctgccgcttgagcccattgtagtcgttggtgagggtccgcagtgccggctgcaaggtcagcaagttggtccggacgcctatggggacactcgggctgtgaggcgggaggggatgaggggccgcggcgtggggcagacagggcccagctggtcagctcacctgctagattctcgtgcacagccttcatctccacctgggctctggcaaaggcctcctcaatggcccggttcttgtcctcttccagggactgcatctcctccagcatctgcccatgggcccgctccagctctgactcgtacatggcaatctggccagaccaggaaaaggctcagtacctcgaggtgcgggagagagaggggcaggtgccacaccgagaaagaaactggtcacctcccatgcacatgaacacacatgcacacacacatgtgcacacccagaggggcagaatggccttgtctccctccccctacagggctgtgagctctgggcattggctccaacaccaacccagtgctgagcacacatcaggtgcccaagccacgtgccctcaggaaggtaggagagggcctctgtgatgacagtgacaagtgccatgtagagcttactgagcacagcctgtgtgctgggccgtgggcacaaagcttcttgggatgacgttcctgagtccccactgtgaggtgggttctgggaccagatcgtgttataatagatgaggaaaaggaaaccagacaaaacttgccctgggtcccgtggccatcggggagaggagggactggaccccgtgtctgtggggtacccaaatgtttaaccgatgcattggcccaagggcctgcctctggcttcctggctgggcatgtgcccccacacagcctgggtacctgcgcccggagccgcgcggtcagctggtgtgagctctgcagctgctgttccatctccttcagcacctgcctctgcatagccacctgctcctgcaggtgctggttccgggcctgggactcgctgagggcctgcttggtcttggacgactccacctccactgtcttgatgacatactgcagggtgagggaggaatggcacgtggagccagcgggcaccgtacctcacccaagagcctgagacgcagcaggccaggggaaggaactctcgggaacatcccactcagaaaccagaaaaaaactagaggagccttgaggtcctggctttccagaaagctgggggggtctcctggaaccttctcagcttaacaagaggctactatgagcctggctggggccccatcctgggtacagacaagaaaggcaaaaagacgagggcagaatccaggggctgcgctgcatctgtgcctggcacctcagctgttggatacctactcggtgcctggccctggatacaggaaggggaaggggcaggaccaagcacagaactggaatgattcttccacccacacacacctacctattcaccaggacaagccccccttatgggctagccctgccccaggtgccaggggccttgggctgaggcacagatcaggtgggccagggctcaccttgacaggtggggactgggcccgcaggctggcaatggtctcgtggctgtcacgcaggcgccgactaagccgctcctcctcctgtgccttctcagccaggcagtccttgagtcgcagctccacctcagccagccggtcggtcttctgctgcacctctaggttcagctctgacagcatgcctttgctttccgccatctccagctgcagctgggacagcttgtcacggagctgggcgctctcctgcagccattgggaggcactggatgagtgcaagggacaggctcactgtgaggagctggggtggccctccaggaccagcatggggaccacggccattctgctcacctggctgtgctcacaacctgggcagggacctgctggctttgtgcgcagctcttgcagctcggcctcacagcgccgcatctcctgcctcagtcgctcattctccaccatcagcaggtcccggtgcttctccaagtcggtgcccccctgcagagagccagggccgagggggcgcatgtggcgagggcagatgacgggggaaagaagagaggcccgcggagatggcacaagggcagggaagagaggagaggtgtggagaaaggcagagggaaggagaaaaagaaaaagaaaaaggcaagggcaagagaggagggaacaagctcaagagagaaaccaagagaaagacagtggagggcagagttgagaagggtggtgacccagagcctgctctccctgctgcccccaccctattctgagtgtgaaagtcacaaggagagacatatttataccagggttcacactcccgtttaatgtcagcaacagagaaggaacctcccaccccctggagccacaaggcctctgagggtactaggaggtggggataaggctctcggtgtgtttctgagacagggtgggatatgcgggctcaggagagagagggtcgcacccctgcccctggcagggcccatctgcacaaggcaggccaggccctgcgctaccccaggacagccttgtggcctcaccagctcagatcgcagtcggctcacttcctgggcctggctaatgagcttctccttcaggtgttctacctgtgggcacagagtcaggagcaaggtgagcctcagtcctcagctccagcctacacccaggcctcctgcccagcaccagggatgactgatgtggctgtggcttcttctaaggctgtggccttaggttcccctatgttcaagcatcccatcacacctgggacttcaggtgagagaaacctgggctggtgctgacagcctcccgcaccctctccctccacaggacagagccaaccccagctcttcaggaaagcccagagggcaagtgcaaccaaggccaccccgatgccccctgggcccacccaacggcagcccaccctcaggacccctcactacacgagcccctcccaaagtcctgtacctgcctgtgtctatgtaattttatgttctctctctttaaaagggcccccagatggtacatactccaggtcctccgagccctagatccaccctggcccagcccccagaattttccacttggggtggtctctggcaagtcagcctgtggagatgggtctgccagtggtcagggcacactcagaacctgtgtccacccctgctcccaatctgccttgcaggaaagctgtggcagccaaggctcttatagggggaagggggtgtgcaccccatgaggaagccacggttacctagcttatccggaccccagaagaggggacaccatcatggtgccagtcccatgagggcagatcccaggggagcaacccttccccggcgctgtcctccagccacccatcccctcccaaggccctagaccctggtctcacatcagcccacccccagaaacctctctcaggaaacaattcacagacacagactttggctccagcttccgtcagggcatgtttagtacttttcttgcagaacgtcctgtggtgagcaacccccacctcgggaaaggtgcgctaagagccagattcctgtgtggtggtttaggaggtttacacagctgggttctcattactaaatgataggcaacaacgtccactgattacaggggacagccaggtaaggcaggtgaggggctgtgcagggcttggctcccaagaaccctttaagaaggcggccaccacgtactctcctcggacgacaggaggtgagaacgcacacccagcatcgccaaaattctcatctttcaagagaggcctaggccagcctgagcaacacagcaagaccccatctctacaaaaagtttcaaaactcagccgagtgcaccagtgcacgcttataatcccagctgtaatccggggggttaggtgggagatcacctgagcccaggagtttgaagctgcagtaagctatgatagcatcactgtaccccagggtgacagagcgaggctgtctaaaaaaaataaaataaaaatagaggcttagagtccgcccccttagcactcagcagcatgcatcagccatagttaagacaggccggacatttggattttgggggtgtgtgtaaaatctccctactttacatggttgagatgtcatcaaacaagtctgtgtcatcaaacaaggtagtgttcggcctcggaggtccctgtctcccagggtgggagagaacggctgactcacagcagctaggccagctctgagtggtcagggaggaagtggaccaagggatccacccccacctctgaggaaaaggccagggagctggcactgcctgctcttggtggggcagggggattccaagatgcaagacccaggtgaaaggctgggggcccagccaggcctcctgggggacaagcaggtgacccaagggccagacccctggaggtcagctctgccgccacctgcacaaacacattccttcctagcaacacgctgggccacgggccaggcagggaggcagagcttgtgccacttctctgcccgctcagtgcctgatgagaggacggctcaagtcctttggcccctgggtgggagtagggacagtttgcatgaggcagcctttctgctttcgtcctaaaattgagaataccctgaataagcacccttagaggagtgggcaggtgaattacaatgtgtatatatagtacatagactattctgtcatcattacattcatgtttatcaggagttttaaatgtcatggggaaaggctcatcaacatattaagtccaagaaacatctgaaaaaccattaagtgtacagcactaaaaagtgggggtctctgggctgtggaattatagttgacaaaatctttatgcttttcagtaatttttttttttctttttgagacagggtctcactctgtcacccaggctggagtgcagtgcctcgatctaggctcactgcagcctagacctcctggactcaagccatcctcccatctcagcctcccgagtagctgggactacaagcacataccatcacgcccggctaattttttttttttttttaatgtatagaagggtcttgccattttgcccaagctggccttgaattcctggcctcaagcagtcttcccgcctcagcctcccaaagtgctgggattaccgttgtgagcccctgcgcccggccagtaatttttcagtctcaaagaatacgtaattcctactctccctaccctgacataagtgaactgacttcctcttcaaaaggttgaagtctccttccacgccccctccctccccagaaaggctgctgcctcagcatggggctgggcgcactaaccttgatcatctccactgccgcccctgccaggcactcagaccctgatgcagggagagtggggtttgccagtgtttgctgggggtgggaggcgggatacccaccagccacctgcctgcggcccagggttctgttctgtccttgcatcacaatgggaacctgggggctcctgggctctgtccagaatctcagaggggcacccaaaaggaagtggccgcaaccgcaaccagggcaggctggggagcatgggggatggtgagggagttgaggaaggggctctaaaggcccctttgttcagaggtgtcagacactaggtcatctctggcttcttgagggcagcaaagcagggggaatgtgactgagacgcagcagactggcaccacgagcactctggccaaggcaccagtggcctgctccgtggcaggtggttggccagctctactgggggctaggtctcgggcttgtagggaagatgtctgctttctcctgcacttgaaggcaggcaatctctcagagttagggaaaacaggcaagaagtcagagagaaacggaggcacctggggaaagcggatggaagatggcctgggagcagtgagagccaagagcaggcagggccttcctcagggaagactgagggcccttcacacactcaccgcagcttccagccagcaagggccgtccatgtctctaagcccaacaggggagggtcccgagtgccaccctgggcccgatacatacttgtggccacaaaggggcagcaggcacatgcctgagcccaagacacaggacggaggagaaagcagactccccactaggcggctgaaacggtcccaggacagcatggacgtcaatccagggctgaggacggaccaggctggggctgtgcgacactcctcccgggcccaggctcctcatcagccagagcaactgaatcacgggcctgctgcagggggcgtcaccctgcctgctcaaggggaagagggagctgggcctgtctgccggcttgacaccacctgcatttacacttcacaggcagaagcggctcgaccaagggtggggccagccagcccaggtctttgtgttttctcagctgtctgcttccaaggcggcctcttaccatcacagaaagaaaacctgctggttacctccttacctcccaccaagcccagtcaacgatcatcagctgtctgctgaggaaaagcgggctctcccaggctgaagctgctgagctgggaaggccagagggtctgggatccagacaacctcaaggaaactcagcccagaggccagcggggcggccctgggagcacaccctgtggagcccacagaaggcctgatcctggctgtatgaccaccggccaggcctatctgtcccctgtccacgccaccctgcctctgttgccaagtcttcacctctgggtccttccgccactgatgggcagtaatagcagctgacaattcgaattctaaagccaggctgcccaggttctaatccagacatccccttacctgctgggtaaccttggacaagtctcttaagttctctatgtctcttagtttccttatttgtataatgaggctacctcatggaagctgtctcgaggattaaacgagatgatatatgcgaaggcagggatttttgtctgttgtgttcagcactgtactcccagtgcctggaacagtgcctggtacacagtaggtgttcagtaagtacctgtaggaagaatgctgaatgcatgaggggccagccagagcagaacttgtggatgaggttggtaagcagagacagaaagggtggtggggctggagcgtgctaaaggatggtcacctccaccaaaggcaggagctgccactagacctcaagcggtgggtgccatgtgggaatgtcagctcagaggtgccacatcttccaatattttatgacaaaaaggaagtctagagttttatgtgaatttaattaagatttgaatgttggaattaatttgattttaaaagcagggcaattagaactaataaattcagcaaagttgaaggatacaaaatgaacacacaaaaatcggttacatttctacaactaacaataaacaatccaaaaaggaaattaagaaaataattccatttacaatagcatcaaaaagaataaagtaccgaggaataaacttaacaaaggttaaatattgtatgctaaaaactacaagatattggtgaaagaaattaaagatgacaccaataaatggaaagacattccatgttcatggattagaagatttaatattgataaggtgtcagtactacccaaagtgatctacagattcaatgcaatgcctaacaaaatcccaatgacattttctaaagaaatagaaaaatccatatcaagggacaccacatagctaaaacagtcttgaaagactgaaggtctcacacttcctgatttcaaaactcactaaaaagctacagcaattggccaggcgcggtggctcatgcctgtaatcccagcactttgggaggccgaggcaggcggatcacctgaggtcagaagtttgaggccaccctggccaacgtgacgaaaccccatctctactaaaaatacaaaaattagccgggcctcatggcaggcgcctgtaatcccagctactcaggaggctgaggcaggagaatcgcttgaacccgagaggcagaggtcgcagtgagctgagattgcaccactgcactcccgcctgggcagcagagcaagactccatctcaaataaaaaaaaaattaaaaaaaaaaaagctacagcaatcaaagcagtgtggtactgacattaaaacagacataaagagcaatggaatggaatacagagtccagaaataaaccctcgcatatatggttaaatgatttttgacaaggttgccaagatcatttaatgtgggaaaggataatcttttcaacaaatggtgctgagaaaactggatatccacaggcaaaagaatggagttggatccttaccttataccatatacaaaaattaactcaaaatagatcaaagagggccaggcgtggtgtaatcccagcactttgggaggccaaggtaggaggagtgctcgagcccaggagttcaagaccagcctgggcaacatagggaaaccctgtctctacaacaagtaaccaaaattagctgggcacagtggcacacgcctgtggtcccagctactagggaggctgaggcgggcagatcacttgagcccaggaggccaaggccacagtgagccatgactataccaccacactgcagcctgggcaatacagcaagatcttgtgtcaaaacaaaaaacaaaaaaccccaaagacctaaatgtgagagctaaaactataaaactctcagaagaaaatagaggagaaaatgtcatgacattaaatttggcaatgacttcttggatataacaccaaaagcacaggcaataaaagaaaaaataggtaagtcagactttatcaaaattaaaaacttttgtataacaaaggacactatcaacagagtgaaaaggcaacacgtggaaaatactcgcaaatcatttatctgataaggagttattatcctggatatataaagaactataactcaacaacaacaaacccaatttaagaatgagcaaagaacttgaatagcaatttctccagagaagacatacaaataactaaaacacacatgaaaagatatttaatatcactggcattagggaaatgcaaatcaaaaccactatgagataccactgcacacctattaggatggctgttacaaaaatgaaaataagcaggagcgagtcccagctactccaggaggctgaggcacaaagattgcctgaggccaggagttcagaggctacagtgagctatgaccatgaacggccactgcactctagtctgggcaacatagcgagacctcatctctacaaataaataaagaaaatgaaaaacaagtgctgataaggatatggagaaactggaacccgtgtgcactgttagtgggaatgtaaaatggtgcggccactatggaaaacagtatgatggttcctcaaaaaattaaaaattgaactatcatatgatccagcaattccatttctgggtatatacccaaaataatttaaaggaggggttcaaagagatacttgtacactcatgtttatagcagcattattcacagtaaccaaaaggtggaagcagcccatggatggatgaatggaaaaacaaaacaaacaaaacgtggtatatccatacaatgcaatattactcagccttaaaaaggaagaaaattctgatgcatgctacatagatgaactttgaggacattatactaagtgaaataagccagtcacagaaggacaaatattggatgattccacttacatgagcagtcaaacccacggagacagatggcgaatgaggagttactctttaatgaggcccaaatttcagtagcagaagatgaaaagagttctggagatggatggtgtattagtcagttttcacactgctataaagaaatacctgagactgggtaatttataaagaaaagaggtttcatcaggcatggtgactcacaccggtaatcccagcactttgggaggccgaggcaggtggatcacttgaggtcaggagtctgagaccagcctggccaacatggtgaaaccctgtctctactaaaaatacaaaagccgggtgtggtggtgtacacctgtagtcccagctatgcgggagccggagacaggagaatcacttgaacccaggaggcgaaagttgcagtgagctgagattgtgccactgtactccagcctgggagacagagactccatctcaaaaaataaaaataaataaataaataaataaatagatagataaataaaagaggtttaattgactcacagttccacatggctggggaggcctcaggaaacttacaatcctggcagaaggaggaggagacacaaagcatgtcttctatggcggcaggagagagatagtgagcacatgaagggcaaactgccacttttaaaccatcagacctcatgagaactcactatcacaagaactgcatggaggaaaccaccccatgatccgttcacctctcaccaggtccctcccttgacatgtggggattacaattcgagatgaaatttgggtggggacacagagccaaactgtatcagatggtgatggttgttgcacaatgagaatgtactgctgctgaacgttactctcaaaaatgcttcagatcagccgggcgcggtggctcacgccaataatcccagcactttgggaggcttaagcaggtggatcacctgaggtcaggaatttaagaccagcctggccaacatggtgaaaccccatctctactaaaaatacaaaaattagccaggtgtggtggtgtgcacctgtagtcccagctactcaggaggctgaagtgggagaattccttgaactcaggaggcagaggttgcagtgagccgagatcatgccacttcactccagcctgggtgacagagcaagattctctctcaagaaaaaaaatatatatatatgcttaagatggtaaattttatgttacgtctatttttaaaatgatttaaaaaaaaaaaaaagaagaaggcagcagccaaacaagacacatttgagggcaagatctagttttccagcctgtggtctctgaagacaaatttttttttttttttttttttttttgagatagagtcttgctctgtcacccaggctggagtgcagtggcgcaatcttggctcactgcaacctccacctcccgggttcaagcaattctcctgcctcagcctccctagtagctggacttacaggtgtgcaccaccatgcccggctaatttttgtatttttagtagagacggggtttcaccatgttggccaggctggtctcgaactcctgacctcagaagatctgcccacctcggcctcccaaagtgctgggattacaggtgtgagccaccacacctggcctgaaaacaattttttaaggttcactcttgaggtgcagggggcaggtagggagtgccgtgagtgccggtcacagtggctcatgcctgtaatcccagcactttgggaggctgaggcagtcagatctcttgagcccaggagtttgagacgtgcctgggcaatatagcaagactccgtctggacagaaaatacaaaagtgggccaggtgtggtggacacctgtggtcctagttattcaggaggcttaggtgggaggatggcttgagcccgggaggcaggggctacagtgagctgtgatcacgcccctgcactccagcctgggtgacagagtgagaccctgcctcaaaataaaaaaggagtgtagtgaggtctgggcagcatgtcacattattgggaacttcaggaaccttgaggccatggctctagggacattcacaagaggacaggggaactcaaggccagcaggacatggcctgggactgttgttaacaacactggggagggtcatcccaacagccacagcctcctgtggtcaccagaccaagatgagcagcctctgtggcctgggtcagctgggtgctcaaggactatgggccattggcccaactgctctcagtaaatacaaacacctcctccacctggcacagcaatgaggaggtctgagaagactcctgagctcccacaagcccaggtcccaacagtgataatggagccccgttaactgagttggctttgccagtagggcagggggatttcataagaccatttttcatcccctattcccctgaggtaggtactattattatccccattttacaggaagaaaaactgagctcctaagaggttaagccttggttaggcaacttacttgaggtcacctgaccagtaagtggtggacctaggaccggaactcgcatctggctgacccttgcagaaccctcacccttaaccatggggccacacagccttgcaggaacagcagtgtgagaaagcagccgatcagaagccagtggtggatagggctggaaacacggcaccatggaaaacaaggcagagtgtaccccctggcgggctttgcttagagaggcaaagttcagaattccaggaaagtccaagtctgagtcaaaccacagtgaggccagcaggagaccagggcacacgggagtgacagctcacgatgcaccacacattacagttgaccatcttttttctgtccattcttacaacagatccacccccaaactgcaatgcgacatttgtgagccccagtttagagactgggaagtgaaggctcagagaggaagtgacttcctacagctgcccagctggcacatggcacagccagaatagaatcctgctcacgggattccaaatccaaaactctcccagtaacaacaatggtggtggccacagcaacaccaatgactcactagggatcatctcatcacaccctattattacatccatctcacagatgaggaaactgacctgcagagtggtaattaactgtcccaaggtcacacagctaataagtagtgccaaagtcagggtttgaacccagctccaggcccatgtggttggccacatctccacaaggtcgggccctccagagtatctcagagacctggagcttcagatacatcccctgagaaatttccagaaaagagctgcagtcagaaggttcaaggacaggctgggcgcggtggctcacgcctgtaatcccagcaccttgggaggctgaggcgggtggatcacctgaggtcaggaggtcgagaccagcctgaacaacatggtgaaaccccgtctctactgaaaaatacaaacaattagccaggcatggtagtgaatgcctgtaatcctagctcctcaggaggctgaagtaggagaatcgattgaacctgggaggtggagattgcagtgagccgagattgcgccattgcattccagcctgggcaacaagagcgaaactccatctcaaaaaagaaaaagaaaaacaacattcaaggacaaaatgagaacaaagaccaggaaccattctgaattcctaagtcacttgtgggagtggggtaagctcgggggttctcctaagagaggctagagagctggggctcaaataactaaaaaggctgggatgtttcctcctcactttcccttcttaaaaagtaagttgattttgttaattaaaggaaaaagtgttttcaaaaacctctttaaagtcacaaaaggttagatactacgatttcacttctatgaaatgttcagaaaagacaaatccataaaaacagaaagcagattaaaggttgccaggggctgtggggcaaggagcatggggagtgaccatcaataggcctgttggagtgatgaagacgtttggcaatgagacactggtgatgggtgcattgccaccttaatatacttaccaccgaccaccgaattgtacaccttcaaggggagaattttatggcatgtgaattatatctccacaaagcccattttcttttctttttttttttttttttgagacagagtttcactcttgttgcccaggctggagtgcagtggcgtgatctcagctcactgcaacctttccctcccgggttcaagcaattctcctgcctcagcctcccaagtagttaagattacaggcgcccgccaccacacccagctaatttttgtatttttagtagagacggggtttcactatgttggccaggctggtcttgaactcctgacctcaggcgatccactcacctctgcttcccaaaatgctgggattacaggtgtgagctaccacgcccagcccacaaagccctttaaaaaacacttatttgcaaaatgaagtgtctgaaaagcctaactggggaaggtcagggaaggaagaggggctgctcagcctttgcctgaggccagacacgtgtccttcagggtgggccctggaccccctgcaaccccccaaggcgcttgagccacacctctcctaccacaagtccttttgcactggctaggcctcagctcagagtacactttcctctgctctgtcccagagctcagctcaagacgcccagggacaagccctcgaggccatgtgtgtgcccatcccagtgagcccttcccactttctgtgggtgtgtgaagcaaatgtccgttttcccccaggcagagcctccaccaggtgggagcctgctgtccactggggtatcccccgtgcccagctcagtgccagtacaaaaggggcgtgcacaaatacccaagggagcaggcgggcatgcagcaggcaagaggatacagggctagcctagaggagtccccagttagtggggaaggcaggcccagatagtcaagctgtggggtaagtgtgtaagaggaagacacaaagcatgaggggtgccccaaggagccccacccgactcagcaaggggcaggtgggcaggccaggccattcttgagaagaggacacacctgtaagctggaagaaatgctgcatttcaaaaacgcgcacaatatgctgcccccagaactgagagaacaagtcacagcacacatgatgcgcaacaggcagacgtcggcatgtccaggccatctctttgctggctcatgggacacagaaagaacttagctctacctgaaggccagtctgtcaacagagtgctgggcccagagctcagaggcccaacagccaggccagggcactggatcagaagtggggatgatgtggcagacaggcttggagaccttggggaagtgggcgaggctcagatacagccacagagacagacactgaggatgagagtggggaaagaggcctgggagcccacatggagatgcagaaggagaagaaagtgacgcagtcacacacacagaagagggccggtggtcagccccatgggacgtgcagctcatgagccaatggtacccaaatgtcctgcccagccaatgaaggagacaacgctgacctgcatgaaccctggctctccctggcttccagaggttgagagatcccttccccaacatgcactcaaactagcatccacctttaacgagaaatcaaaagaacaagaaacgtcatgccaatctcctgtggggtgaccatctgatgagttttgtccgctcaggctgcccagtgcagggcaccgtcgaagatggggtggactcagggtgggaagcaccccgcaccttcctgctccactcacatctacgtcacctcctagtggggaaggtcctggcccctggtaaccgcaaggagatggggcacaaggaggaccaggatgggaggcctctgcaagctgaaagaaatgctgcatctcaaaagcgcatcctccaggatgggaggcctctgactctcaccaccctaccctccagcgtattccaggaaacgagaccccagctatctcctcttacaccagtagcctggtggggtcaggtgcccaggtgatgtcctctgacctgctccatagtgggcagtggcctctgcccatcccagcctccccaggtacctggttctgcagctgggtggacgtggcctgctggtcactgtcgcggagggccagcctctcctgtaggaccaccagctcctcctgtagctgggtcttctcgtcctggagctgggacatggcctccaccatcctaagcaccatgggggccgcacctggtggccccgacaagctcgagcacctcctgctgccaaagagacgcccacctacgagcaaagtagtggctgatgagagggcagcagaggtcccacgctggcagaggagggggtccatcacagcaagacagaccaccagggatgatagaggtgcaagcagagggggtgggcaaccaggtgagggctggggcggcagcggcataggttagctggggcctccagggcctgtcccagaagaagacacttccccaggcagcatctgggggatgaaattacctggatccggacttaagaaagcaattttcactgaatacggctctcaaagcacatgttctaggtctgatgggccagcctctctccatggccaggctgcaaggaatcgcagctgggaaagacaagggattctcaccctagaaaactctattcttgtaggaacgttatttctttaagtctcaaaccctctcaagagtacagaagagtggggctccccagcctgcccctgtggcaagtggtcaactgtgcagaaagaggggagccaggggagccgtgtgtatgtgcgagggacagacagaccaggacacaaagccagccccacacatggagcaagaactcagccagccggcacctagcaaggatgaagcgcaggaacctcccaggcaagagagagggaaacacccggctgggcagaagctctgcctgagtcctcctcctccaaaggcctcccactgtcctgtcaccaggaacgagagagatggacagatggatgaaggacaagaacacagaatcagggcccgtgacctgtgcacggggcctgggatgcttgttacagcttgcttccagggcgccaagaatggccatggtctttgcaggtagggagcaaagagtttgggggagagagagaagaatggggggctagggaggagggatggggggtttgcctcctcccctcagggagcaccaaatgggatgtgacagagtgtggcagagtgaagggtgaagagggcatctgctggccagagagcgctgccctccacctcggagcctggggctctaggtgttcccacattagtccccaggaaacccagccctcggcaggctggggttggggggatcttagactctgggaaggaagccacttgcacctgaagtcacacacccctctgacagcctggcctgagggaagccaaacggactcagctggacagggaagtggggagggtgcagcttgcagctgggcggggacatctcagcacagccccaggaggaggggcagatagctacaggcccccccaacccgctctaggagagcaggaggggcacgcacaggtcggctcttccctcctccacccgagcactccagagagctggagctgggcatccccggttgggtggtgaccctggctgtgtggcctgcacgtgatgcagcatgtatgtcacacagagctggccaagctcctgcgatctgttctagagtgagtgagatcagacggatgcttccaggcctgcacacggggcagcatgagcagcacgtgaccagcgtggccctcagccctttgcaggctgctgcagtgaggcagggaacacactggactcctggcccaagagctggttctgccactcgagagacgtgtgggaggggcccagcaggagcttcctaggagaaatggggacaaggagccttgcccgaaaggagcccagcaccatggacatgcacaggtgtgggtggctgttacacaacaggccatggggcagaaatgaggtctcggagagcccagctcatccagaacactgctcacgccacgggatgtcacccctgcaggggctcgccgggtctcagcaccgcggcagggcagtgggaagggggccaggagagtgcttgtggagaaaagatctccaagaagctcatggaggccccagaaaggggaggacgggaggacaaggtgagatcaaaggggcccttgtgctggggaggctgcactcggggctcaaagatgcgatgcaggcgtggcctggacccactgaccaggtaacccttgctgttccctgggatcggccttcctcttctcagcgcacaatcagcaagatgatgtcccctgcccgaggctggcctgcccacactcagccagaccccaacccctgccactcgctgcagaggagtgcctgggcccagacaggccagaaccccagaacagggctctgggacagcctcagagaagggagtggctccttccaccacatggcaagttcagacacacaagttaaccttttggcaatggaggaggaagatgacagaaaggccagctcctttttccgtcacacgctctcttccttccgggctcctagaggatgctgcttccccattatcaccaggctctcgcttactgcgagggacccccggcatggacccgtaagactacaaggggggcctgtagaatcttccagaaccagccagccctgggcaccatggcaggccctgccagggaagagctgagccactggctcctttgtctcagcctctggccaggagaatcaaagtcctgtcctaggagcctccagaccctgggggcccacggataggagggagaaggccgagtctctctctgcaggtggtggcgtctgtgaggctgccaccctcgccctgctttagacaggcactgggaaaaaacaaaaagcagggaaattcaaccccagcccacgctggccaaggactcttatcactgggtggggcctggatgctgtgggaggcatgggtgagatgaaggttctatacacaccactgtccctgaatccgggagaggcaggctgggggattgcagctgcggatcaggcagctggagtctgtctaggccacctccagccggggaggacagggcatggggatatcaccaactgcacaagagcctccctcctgcgctggcttcactggggagtgccggtttggcgggcaggcctgctttacctgtattctctacattcatggtgccaccagcttcccgggcctcccgggcccgcctgggggccggcgcctgtctcttccaaagcttctcttctttcgtcccctgactctggctcttgcaccccttgtcctgcagggcctgctgccaagacacaaccagaatcctcacgtgaaggagactgtgccagggaaggaccctcgagccagaggatggtgtgctcccggagctggcaaggatcccagggcccagcgggtccagtccctccctttgtgggtgggtggggacgttgaggtccaggatctggaagaggatgtgccaggtcccacagcaagacagtggcagtgccttctcctggcctccctcagcagctggtcttctgcaccagcaaagaaggttcttaggtacttcaagttctcaggtgaagctcatgccatccctgcagggtctgagagtcaccagcacagaggctggcttgcttccggtgcgcacaccccacaggcaaccgtccagtcccaccacacacgtatcaacctcagggcaactgctcccatgccagctgctgccaccccaggcacacagccccgcatctccagatgggacccccaggactgccaaggaggctgcgcaggagtccgtccgagcaggggaagggccacagccctgcctccttcactctctccgccccacagggctatcgagaggccatgggaagccgtctcctcttccagggggaacacaggcaaaggactcgagacaaagagagccagtgcacaggcacagggagagagaggggaggcacgaagaggtgtttcatccagagaacgtcacctgccgctcacacagaaagatgcccaaggcaggtggcagggccacatgcaaagagtgatcccatttgaggatcatgaaaataaaacaggcatagagacaaatctagagaactatatagacagcgatcctctctggaagattcgggggggatggtgtagtggctgagagtagaaagaagcatcatttcaattttgggggaataaaaagaaagttcacaacagagagaacgtgagaagaggggaaaggaggtggccttacatttcatgttgaacctctttggcatttgaattgttaaccttataaacactgactgtgtttctttgttttgttttgttttcttttcttttctttttttaaatagagtctcactctgttgcccaggctggagtgcagtggtgtgatctcggctcactgcaatctctgcctcccaggttcaagcgattctcctgcctcagcctcccaagtaggtggggttacagatgtgcgccatcacacctggctaatttttgtatttttaatagagacagggtttcaccacgttggccaggctggtctcgaactcctgacttcaagtgatccacctgcctcgacctctcaaagtgctgggattacaggcatgagccactgcgcctggccatttttttttgctttctttttctttctttctttctttctttcttttttttttttttttttaaagacagagtttcactctgtggcccaggctggagggcaatagcacaatagcagctcactgcaaccttgacttcctgggctcaagcaatccccctgcctcagcctcccaagtagcagagactacaggtacacaccaccatgactggctgatttttgtattttttgtgtagagatggggttttgccatgtttcccaggctggtctcaaactcctgggctcaagcgatcctcctgcctcagcctcccaaagtgtcaggactacaagcatgagccaccatgcccagcttttttttttttttttttcatatcaacagaggttatcttggaagagagatagcaaacaatttctgtgtgtctttgtgacctttaaattcaaaacaaaaaaaataagccactcttttaaaagtgctcagtctaaaaaataaacacgtagtctagaggcggcaaggcccgtgtgtgaagcctggctcttcctcggctaagctgtgtgacggtcggcaagttgcttaccttcttgaagctgcattctcctcattcttaaaataaaaatggtaataacaggaccgcctcattgagcttgtgtgaagagtaacagacaactgcagccaagtccccagaaggtgcctggcacatagtgagggcttgatatgaggtagctattatcaggacatgattcctgtaatcttcacatttttttactttgacaatcaaaaagccaatacagataattgaaaagacaagaaaagtgacatcagcaggctccttagcccaaaattcaccccctccctctctcgacccagagctccacttgagaagggcgggtggcagacacacctcttatatttaggaatattcctgctgggcgcagtggctcacacctgtaatcccagcactttgagaggctgaggcgggtggatcacctgaggttaggacttcgagagcagcatggccagcatggtgaaaccctgtctctacaaaaaatggaaaaaaaattagccgggcgtggtgcctgtaattgcagatacttgggaagctgaggcagaagaatcgcttgaacccaggaggtggaggttgcagtgcgctgagattgcaccactgtaatccagcctgggtgacaactcaagactctgtctcaaaaagaaaatagaaaattccctccaacttaattttgaccccaccctgtgaccaactgccacaccatcgcgagcaggcttgtgagccatggcggcaaggacagcagctggaagtttccatttgccagccaaggcaaaggttacgctatttctggcctgttggccaagccacaggaaggacagacggggccctggggggttgggaatttctgcagcgcctctgtagggtgcatctcaggttttaactgctggacagaggctagggagggggtgtcactaaccctaccaggttgctacactgtgcttgggacccactctggccccacatcttcgaccctgaagcacctaccgcataatggagctttgtgggggcccgccaggatgtgaacgtggaagctagttgctggtgccagcgtcccagagatcttcagtagatctgctgaccccaggactcagctgtaaccacaactcagcaccccataatcaaagctcaagaacagagccaccacccaactcgaggctgtgggtttctgactgctgccttccaatttaactacagatggctcaagacagagtaaagagcgggtcctcaggtttctttaactgttctctcaccagacctgcttttctaacagatttgaacagataaaagaagaaacttttggttcagttttcagatgaatcacataagaaggaacaagaaacacctcgaaacacaagactgtccctgaagcaacatcaacccctgcacccgtgttcagatcaggggctgggacaacaagctacccgggccaggacatccatttgtaccaggaaggacacgtccccttgaagggtatgtgtttcccacactccatcctgtccacaatttgtacacattccttcaaggctctgtggaaatgtggcttccagaaagggcagaatcagtgtgtgtggatggtcaggagaacatgggggagtggtgggccctctcgtgcaccggctttcttggggggtgggccttggcagcatccccagatagccctggtgtcagtcctctgccactgccttcttggcccctgcctggtttgccttcatcccttcgtgattatttggtcactctctggcgcctctgctagactctcttgtctctttctgcactgtacctctgaccctagcacagactggcacattctaaataatctgttgaacaaatgcattaattaaaaatgggcagagcttgtactgccctgaaaatactcaaagctatcactgcatgaacacagcacagatatttgtttaaggagctcactgcaatcagaaacaatacagaggatctgttataaataatttatggtaagccctgaagtagactattacgcagccgtgtaaaagaaagaggtagggccgggcgtaatggctcacatctgtaatcccagcactttgggaagccaaggcagagcccacaagttcgggaccagcctgggcaacatgatgaaacctccgtctctacaaaaattacaaaaattagccaggtgtggtggcacatgccagtagtcccagctactcaggaggctgaggtgagatgacttggctggaggttgcagtgagattctaccactgcattccagcctgggcaacagagccagaccttgctcaaaaaaaaaaaaaaaaaaaaaaaaaaagggtagttctctatgtgttgatgagcatgaagagattaccaggacttacttgagggaaagagctagtgacagaataacatgtaaaataaataataaaaatcatataaatatgcactgggaactgtggctcatgcctgtaatcccagcactttgggaggttgaggcgggtagatcacttgaggtaaggagttcaagaccagcctggccaacatggtgaaaccccatctctactaaaaatacaaaaattagccaggtgtggtggcacatgcctgtagtccagctattcgggaggctgaggcatgagaatcgcttgaacctgggaggtgaaggttgcagtgggctgcaatcatgccactgcactccaacctgggcaacagagtgagactctgtctcaaaaaaaaaaaaatcatataaatatggctgggtgcactggctcacacctgtaatcccagcactttgggaggctggggcgggcagatcactcgaggttaggagttcaagaccagcctggccaacatgatgaaaccctgtctctactaaaaatacaaacattagctgggcacggtggcacacgcctgtaatcccagctacttgggaggctgagacaggagaatcactggaatccgggaggcggaggctgcagtgagctgagatcatgccattgcactccagcctgggcgacagagcgagactctgtctcaaaaaaaaaaaacaaaaaaagagttcaagaccagcctggccaacatggtgaaatggtgaaaccttatctctactaaaaatataaaaattagccaggtgtgatgatgcacacctgtaatcccagctactcaggaggctgaggtaggagaatcacttgaacccgggaggcggatattacagccaagatcacgccactgcactccagcctgggcaacagagtgaacgagactccatctcaaaaataaaaatcatataaatttaattaagtggttctatataggaaagataaacaaataaacaccaaatacttaatagtggatttctcaaagatagaggactaagagaggcagtttctggataactgtatctctgccctgttacaaggctagttgtgttgaatggtcgaatatgtgaccagcagcgagtaacttaacctctctgagcctccacatcctcatctataaagctcagatcaaatactgtatcctgagattgttatgagtatgatgaggactaacatgagatcttttaatgcctggcacagagtccatgtttgataaacagtagctcttattactattatcgttatgtattatttctatagccaaatatacatacatatgtaaagtttatcttttttcttttctttttttttttttgagacagggtctcactctgtcacgcaggctggagtgcagtggtgcaatcactgcagcctcaacctcctgggctcaagcgatcctcccaccccagcctcctgagtagctgggactataggaaccaccatgcccagctaattttttatttttctttttgtagagatagggtctcactatattgtccaggctggtcgtgaactcctgggctcaagcgatcctcctatctcagcctcccaaagtggtgagattacaggcctgagccaccgcgcctagccttactttgtcattttaaagtcacttggtgataactgcaagggagaagaccccaagttttagtgaatcctccatctagctttgaattctcacttcaaacaaggaaatattcccaaggaaatacaaggaaatactcacataaccatgtttcagaataatcaaccaccccaaacctgcctgttttcccaataccttctccaagctctgcccatctcagctaaggccccatgcttcccattttaacacctcagccagggcatggctgaaaagctcctgtcagctcctatgagatttcccgtctgacttaataaagcaggctcccaggcagaggggtcatgaggggcccaacagagaggtgcgaggtgggtccccggctctccccaggtgcttcctacccccagaagcctggcaggaacccagccactggagctcagagagccaaggcacatgcagcctggaaggccccagtgcttacctgcagggtcaggtagagcccgtgggggcttccggggccagcccagtccacgctaagggctcggcactgagctagggctgggcgagctgcacttcgggcactggagtcctcgtcaccgcagactggggtatcttttccacgccctgtcccaggacagagagataggtgagacactccgaccactggccaaagactgctagccatggaccactggccagggccgcagctgagctcagctttcacacatccctggctggtccagatgtggccaggaggggctcacacacccaaaaaacgcctgccctgcagaggggaaggcctggctcggggcagtggctacgctccttccttaccaaaagccgcccaaagattctcttctggaaggggcccaataccccaccggaggctcccctatccccacagtggcttttggggcaggcatctgctcagcagggaagtggaaggaagccattgccagccagcctgcatgaagctttgaggacttgcacaggggctatggctttattaccccggctgcctctaggtggcaatttcttccctgacttcattaagacaaaatccaaaccaggtggcccagcctccgttgcctccccaagcgtattcagaaccagctaacgtgcatccccttgtgcctctgacacaccgcctccctcacccatgggagagagggcgggctgtggcagcaatgccccagccacccacctccacctgcagggctgaacagggtgggatgggggccagcctcacgagtcatgaggcacactgcagagccactaccctggggcgtaacaatatcccgagtgccagccactgggccaagtgcttttcaggccttacacacattctgtttttttgggcttttttgtttttttttttttttttttttttttttgagacagggcctctctctgttgcccaggctggagtgcagtggtgcgatcttggctcactgcaacctccacctcccgggttcaagcaattcttatacctcagcctcccgagtagctgggattacaggtgcgcaccaccagcccaactaatttttgtatttttagcagacacagagtttcaccatgttggccaggctggtcttgaactcctaacctcaagtgatctgcccgccttggcctcccaaagtgctaggattacaggcgtgagccacagcacccagcctttacacaccttcttggtcctcagtttgcttgtcaataaaatggggacaacttcacagccctgtgataaggatcaaatgggatgaaatacacgtggtgcccatgtagtgccaggcacacagaaagggcccacagtacaggccaataggactacagtagccatcagctcctcaaaactccccagggaggtggggggcattctccccacctgacaggcaaagaaccggaagcctggaagggttaacaatgtgcccagggtcacagggagccaggattcaaatcccatgtgctaatcaaccctctgccagccaattctcagggtggcaatatgggggttggtcgggggactcagaggggcctggggcagctgagctggctgaggcccagtggcaggcacggcgcttgcatttcacacacaggatttcatctgacctttgtcttaaattttttaagtggataaaagtctgtatggtcatataatcttcataatacccaattttttccttcaggttagaaagctgagataacacaatatttcaaagacctatatgcatgcacacacacacacagacacacacgactagaaggcactacataaaatgttcagtgactaacttgtgatttttatttcctttttgatatttttctatgtgttttaagttttctaagggaaaatgcttttgttttaccggaaaagcaatactcattcatattacatttgtaatacttaggacaaccttatggggtagaggccatcctctgcccctttcagacaactgggctacctggcccaaaagcccaggcttttccccaggcccctgggtcatccccagcctggctgtgctgcttgggagcagccagccccagacaaccatagaagcagagagacctcggaaggcatcagtccagctgccactgacagcacaaatgtggtgggagagaggggtgaacaggagtttgctgtgtgccctctctgggcctcagtttccccttctgtgcaccaaggggcttggacctgatggcccagagggactctgctagctctcacaggctggcagtctagaccctgttcctgtaggtcacgagggacagggagcagacccctgaaggcaccttgcctggagagccctctctcccccacactaccagggcgacctgcccacgcctcgggagagggtcatggacagctccgcggccccgccaatccagtcccggccctgaatcagagaagccgctcacttcttgactttcgcagcaccgggggacatgacccagaaaggcgagctggcactgacagctccccggggggtacagtgggggccaagactctgggacctctgcccacctgctgtcagggtctctacagaagcacctgaaatgagcacatggaccccaagccccgccaggccacgttcccgagcagcctcggtccactcccaacgccgtccaggggccagcccaggcaggatcaagtgtcagcggcgcttggtgcccaggcagccacttcacctaccttgtttaccagcctgggcagagaccggagctagcccacacgctcttggccaaggacggcagcccgcagagctctgaccagcttggccagagggaatgcagctgattccccctgctctgtgcccgacccgtgttaaagtttaacccggcttccaggtctcctcttttccagacaggggcgcagggaaggagcgcccggcgagactgacgctccggctccacgcccgcctggctctgggctgtcggttaccctgtaattacctgacagctctgactgggcttaggaaccggtgagaaacctcagtctcatctctggtatctggaggaaggaagggaaataaagaggcattttaaaaatgcggactcaccagttctcaacctccccgggccggtgtgtgggaaagggcgggcggccgggctggctggggctggggcggggcgagccatccccggctcgggctccggggcccggcccactctccacaggccccgcagcgagggcgtggctcccaggttccacgtcctgcgagaggggaccatggcctggggctcagcagcctcctcggggcaccaggcagcctgcggagagaacaaggggagataagcttgaagaccgtggaccagcacaactgcacctcgggcagagccagccatctggaagggtctacgccccaccggtcgctggttacccagcgcagcagctccaactgcactgtcccccaaagaccctagggctcgcaggatgaaatggggcctgctgccttttgggggtatttgtttccgaatacggaggctccgaagtgcgaaagttgcatatcagctgtgcctgagaccccacacctgagcccttcccagctgagcctggagcctgaggacaagccaggtcctagccccacacagaggaggcaccgcgagtcagcagcatctccgtaagtctaatccttttcctccaagacatctaattttctaattgcacttaaccacatgcttaacccttaggcttcaggctgctctgcctaaggcctgtcagcagagcagtgaatgctctgaatattaacatttcactgaggagggactcaaaagggccctgactgtggccaatgacaagtgaagtctatatacagtaagttctcattcatgtattcgactagcctgcgctctgtgcctagcatgtggcaggcaccgtatgggtgttgagatacaaagattcattcagtcttcatttaataatgcctactgggtgccaggcatctgccaggggtccttttggatcagaagagatgaggcctgaaaactcccagtcagaagggagataaacacttcaaaaaaaccctcacagtctgagcaggctactggaggcggcaggtgcgagccaggcaccaggtggtgtggggaatggaggggggcagagagcattggtcagggatagaaagcttcagtcagggataggtccctcatgaactgaacaaatgaacagagctcaggtattccctgcagaagtctttattgagcacctactgtgtgcaaagcaaccttgaggacatttaaggtgatcatgctacagtcccagactcagacagtaatgtcatttacagaagaagcgaagtcagcttggagaggcaacatggggttttaagattgaggtgggggtaactgaaggacttcctagtggagcttcctgggctgtcgactactctccccatccgtcactgcagtggccacttcctgccaggaagtgaagatagctatttgaagggtgtccacctcccctgacccactatgggcccacacacattcatgtttgcagccccactgcacccagtctgcagctgcacccacactaagaactctgggatggcttgtggggtgaacgttctgaaatgaacacacacaaaagcttgaactgaagcctggaagagaggtcagggctggacacagactcagagctaaacagggccaccaacgccacaggtgaggaggcaatcatcaaagcttgagcaagaggagacagccatgtgataacagggctcactgcggggtggaaagctgcagaaggaagctgagagagggacaggagctccaggcaagtatagagttttcagaagtgactgaagtgtaagtgggaaggagaggttggtcagtgcccagtgcatcatgccaaagagacgtggaggactgaaagcccagacaggcagaaagcctgagcctgtggagggagaagggcagatggcaaacttcggagggctcaaagagtggggcgggagctgggggaggaagcagccacttccttctccttgggggtgtttggctaggatgggaaggagaggatgtggtgtctagaatagggggagagttgagcatattggggagacagagagacaggagtgactaaagcattgagaggcaaaaataaataaataaataaataataaagtaaagggtccaggggttaggggcctgaagatctggtgtctgatgtttgcagagcccaaccctggaagaatgccaggcacctggcgaggaagccatggtctcttccttccttgacttagaacaactaggaggctcctaggttcagtcttactgggaaggggatgggaatgtgggccaaaggacagggcagaggctgatctaaatacgtgggccagctccactgaggaaactgagatggaccagtgtggcgtggaagaaaccaaggggagcagccaaatgtcctcttctccaggctgcctggcacagagctgggcacacaaccaaccctgcagaccagctgtccaatgggcaagggaaggagcaaggcaggtccatctgcagtctcggctgctgggaaggtgagacagtgcagggcattggaggctgactccacagtggacagagaagactttcagggagatcagctcagctcagtctgaggggcagggacaggaggagatagcgtttctgcggttatcaggaagggaagtggaggaggcagccaggaagatatcgggaagaaagaggaagggcgtgtgctagatcccgaagaggaaaaagcagctgaatttagcagcctcaggggtgtgaaggtcaaaagtatcaaggaatcttaagcccagggttctgggccaagaaagcaggactctctctcatttacatgggcatctgagatgaaacctggtgtccggggacttctaccaacctaggattcgtgggggagggcagtgggactggttcagaacctggctcccctgtttactagatgtctgaccttgggagaattactttgcctctccgtacttcattatctccatctataaaatggggagaacaccaccttatagggttgctctaaagattagacaaggccaagtgttcagaacaatactggcatatacaaagagctccaaaattttatttttcagttactttgctccagtggtgggtgaatgcagagggcctggctggggaagagggtctctgcctctctgggtttagaccaggacagcagagctgcaatactccccctgccctagatcagggacattgcaaagactggggggacaggctggacagctgctcagagactgcagcaagcagggcttggtcgccctgggagagcaggcagaaggtcaaggaagttgtacagggaatgccacctccctgcacaccatcatctatcctgggctttccagggcaacctagatttcaaaccctctgctccctggtgcccctgtgaacagcagaactcaccaccctgtgcccctaaagtccactcactgcaaatgcagggccccattctgagactgcattcctagcaaatgactctccctggtcaaggagacggctactctaacaagggcatggggaatacacgtctgggaaagaatgggtgctcaccctgttcaggcagaggaaaagccggggaaggtgaaagaccaggggtggccacaacccgcaatcttgagacagtgttggggtatggaggtgggggctgggtggcagtaaatggtactccagaatttaattaaacacagcttcctctttaatatctcccaggaccaggcccttcactgcaccagccagagttctgctctaactagcaatgctgggcttaaaggggtggtcctgggatcgccctccctgctgagaccctcacaactgctgcggctgtcaatggcccgattcctcactgcccggagggcaccggccaaggcccttcttcctaacctctgggcgggcgcaccccgccccaggccctgccagggaaaaagcgaactccccaagggacgtggtgggagggacccaaaggcagccttccagggagccctgggggtggggaagacgccaggaaggggagagggcggcgccgattgacaagcccatcccgggtagggtctgcgctcttctcgttcaataaaatccaaacggggtcccgaggctgctcggatcccgtgggacacgccgcccctgtgcccagctcccagcaaggtcctcgactcgggctgaacggcgctggaggggacctcgcagggctgggtctcccgggcctttccctccccgcgcccatagcgggtccgggcagaggggtcccgagggcagggccggcccggacgcggcgccccaaacggcgggccgggcagagcccagcgccccgctcgcacccagcccgcccgggccccccactcaccggcctggcggaggcaggatccaggcgtcgccgcagcgcccggggctcggcccggcccggcccgccggcaggaggcagctccacgccgccgcctcctcctcggccagcccgctcgcgcccctcccgcacactttccacaggaaatgattaactcgggccgcggcgcgttcccatggcaaccggctccgaccccggcggggggcggcggcgcgcgcccgcactcacgcgcactggcgcgcacgcgtcagcccgggcgcgcccccgcaggtctcccgccggcactcccactcccactcccactccttcgcggggcctcccactcggtctctcccgcctccccgcgtcccgcactcgcactggcacacgtgctcatgcgttccctgaaggctctcacaaaacaggcctgcacacgggctggcacacacgaggcagcccacacagccccacacctggtgagccatgcgtacttttgcacagcctcaaacccgagtgcaaaacttccacgcgagtactcacacatacacttctcacgcgggctctcataccagtacgtgtcttcccatcccaacacacacacaagctcttactcacgagacaatacatgtacatcccttaccgtgtccttgcacgcgctggcgcacatgcactcacactgtttacagcgcacacgctctcactcgctccaccacctactcgctggccaggccgccttctagccacagcacttcctacctctgcacccccagccccaccccagcaaatgaatatcttcccagcaaggaagctgcctggagtcccttaaggtaaaacacaccaatggtgcagcagttcccggccttgctgcagaaggccctgctactggggcacctagagcctcagaagaggcctgggggaggccaggggcctgccagccgggagagacagctgacctggaggagccactctgttctttgtctcccaaacagaggcagcattttattccagagccagcagcaatattctccctcactctccacacccccgggtgcggaagaggagaaagcaagtcactctgaagccagcccatgcaggctgacggttctgcagataatcccaggagggcgggtactctgtcccttcctgcttgtcaggggatggcccaagaagatcaaggagaggactggagggggtcgggcaactccaggtgggttctatctcctgctgccgcccaggcgctgggctgccagtcaagaatctcgaccagcgacggagccaagggcctgggcctcagattgttctggacgccagagcaggacagtcacagtcccccagctggaagcagcctagtgcatgctttatttgacaactgagattcctcagtgaaggcctgatagagggtgaatgtaacgctcctggaatcattccctagagagttagatttccagctgaacaccacactggagaacccttccaatgggagagaaagccttatttggggagttatgatctctgaattcctctgcctgccctccaaacagcagtgatccaggggaccgcaagggtggatgaaggcaaaatgtctctagaattctgatttagtatctatctcccttgattatagtccctatgagttgatggggcgggggatggggaggacagaatgtctttaaagtcctggttcaaaactggagactttttcttactcagggattgagtacattgacattaactgtaggtccttcccaccaaagccaaagccagatttttaaattaataataacatttattgttcttttgctttgattacaaaagtaatagatgttcattgtaaccatatcccacacactggagataaatgctgccaacactttagaagtctttttttttcctgtgtacataatagatgccattattgaagctaacactgtgtcaggcacagcactaagctctttataaacaaaatcccatttaaccctgaacaccctatgaacaccagtactgtttcaggacacccgtgtttcaggaaaggaaactgagcctcagaaagtttgttcacaaatgcagtgtgtgatagagctatgactccaataggtactcacacagtactatcagatgcatatgggtataacaacttattaagatcaaagcaccagcgaaggaaaaaggaaattgaagtgtaaggaggttgtatttttggaattctagcaaaactccgatttgaaacgtaaaaactacttgtttcatggttgttgcatttttgagacaagatcttgatctgttgcccaggctggagtgcagtgatgcaatcatagctcactatagccccgaactcctgggatcaagtgatcctcccacctgagcctcctgagtagctgggactacaggcacacaccagtgtgcctagctaattttttttttttttaagtagagatgggggtgtctcactatgttgcccaggctggtctcaaactcctgggctcaagggatccttctaccttggctttccaaagtcctgggattacagatgtgaagatgtgaatcactgtgcctgactcaatttttttttttttttttgagacgggggctcgctctgtcacccaagctggagtgcagtgggattacaggcgcacaccaccacacccagctaattttttatatttttggtagagacagggtttcaccatgttggacaggctggtttcgaactcctgacctcaagtgatccccctgcctcggcctcccaaaatgttgggattgcaggcatgagccaccgtgcccagcatgactcagttttttaaaaagaatattgtgtggagtcggggtctagctctgtcgccctggttggtctcagaatcttagcctcaagcgatcatcctgcttcagcctcccaaagtgctgggattatttgcatgagccaccataccatgcccatcccagttgttggaatttaagaatgtacaatgtcatcaggaactacgtaccaactccaaggtcatttctaacccagaaacttcgctgatgatttgcataggaggctgccaactctcctggccccgggaaaggtgcaagttttgctgaaacctggccattccaacactgaagtcctaaacccttgagggaggactcttgggttcagccttagccttgacccttcctgccgaactctggcagaggcacagctgtctcagggagggccagacagaagacagtgtccagaacactgcaattccacgcccacatccaccccatccccaggcagggactagcagcgccatctttgtgttcagacaagatcaggtgtgttcacggtggtatgcccatagacttttttttttttttttttttgagacagagtctcactctgttgcccaggctggagtgcagtggcgcaatctcggctcactgaaatctctgcctcctgggttcaagcaattctcctgcctcagcctcccaagtggctgggattacaggcatgcgccaccacgcccagctaatttttgtatttttagtagagacggtgttttgccatgttggccaggctgctttcaaactcctaatttttgtatttttagtagagacggggttttgccacgttggccaggctgcttgcgaactcctgacctgaggtgatctgcccgcctcaacctcccaaagtgctgggattacaagcatgagccaccacacctgacccatctttgtgttcagagggcctgaaaccctttactgctcaggcattcgtcagagaagtggccaagagcctgagagttctgctccccaaagggaaggaaagaaggggaatgaaaagtcagattgtgtttaatctgattctcatagcaacccagagtaaagcacagataagatttacatgattttcccattttaaatgatttaacctcagatcaagtcttctccgagcctttgcaaatgttgtcctccctgcctggaaagcccctctccttcaccccattctcatctgcctccactaacccttacctggccaattccatacctgcttgtccctccttcaagtttagaggtcaccttctttgaccctcccaggcaccagcaggcgggctcaactcaccccctgcagcatccccgaccctggatcatgatggcgttcctgtgtataccatctgctccttcaggacaggaccctttcgttacttgatcacagggaaatcctcagctgaccccagctcagggcctggtatcacagacatgttcattgaataaatccatagatcccatagaattcagaagggaagaacaggtgcgtgaaatgtacccaaacagactttcttcccatgtaaagtaatgataatttctaccaaaaggaagtaagagaaggctccttagcaattatttccatgtggtcaggaaggagtgccctgcagctgtgaaaagtgtgtcctctcatgcttctgggtaacagaacatttattgaagttggagaaactcattctggagtgagccgcatattaagtaatcctgacccaattagctgcttttttgaatccacatcttccaatcttccaatccctctgaaatcattcatcatgagcaccgcagaaagaactacggaggaggctggacgtggtggctcacgcctgtaatcccagcactttgggaggctgaggcgggcaatcacctgaggtcagcagttcgagaccagcctggccaacatggctaaaccccatctctattaaaaatacaaaaattacccgatgtgctggtgggcgcctgtaatcccagctacttaggaggctgaggcaggagaattgcttgaacccaggaggtggaggttgcagtgagcaaagatcatgccactgcactccagcctgggcaacagagcaagactttgtctaaaaaaagaaaaaaaaaaaccccgtggaagagctcttggaggtgaagagcctggcactgcacccagccccataagcatgaatttggtttccagctttgcatgtcaccaactgcaggtcttgggcacatgactcaccctgagcacctcagggggtctggcacaaggctcacagctgcaagctctcaggaagccaggctcctcagtgggcatggagaggtggtggtcttggatgtcccttgactggactgtaaattcctgtcatccttgtctgctctagacccagctcagcaagcattaggtgttcaagtgatatttaaactaatggtacttttctcactcttttctctccctctcaccttcctgctccctgtgtcccttcctttctagaagctgtattaacaggggaaaacagttctcccattttcagagaaccaaggcaatctttcccccaagaaaatcaccttgccggccaggcacagtggctcatgagacaggaggatcgcttgaggccaggagttctagaccagcctgaacaacatattgagaccctgtctctacaaaacaacaagccaggcgcggtggcacaggcctgtggtcccagctactcaggaggctgaggcgggaggatggcgtgggcccaggagtttgaggctgcagtaagctatgatcgtgtcactgtactccagcctgggcaacagagcaagatcctgtcttaaaaaaaaaaaaaaaaaaaaaaaaaaaaaaccttctaagaggactagaaaataaaaaggaaaccaccttgctttaaaatccaaatggtggctgcctttctgcattggccaaaaagactgaactcgacagttctcccctaactctcagtttaggggaacctaaagccttatgactcaaggaggaatttggcggagattccctccctcctagcactccaaggctaaaagcaaacggaggctttgtgaggttttttttccccttttatcatttcctgtagtcttaaaaaaatgagaggaatgcaaacattgaggagataatggacgtaagcaccaggtaataaaaagatttagcaataaccgccctgagagtagcacgggccaaataagccccgcccccggcccgcctctcagcccgaggatcctcccaccatcctccagaagccgccgggctcctccttgctaagtgttctgccgcttctctccttgctcctaaattgttatagctccgggttctaaaccagcacatgcgttattaacatccttcgcatttttccccacttcctcattcacttctccccacctgctgcaaattctaggtggcagtttttgtttttgaacttaaaatttttttttttctgcacaaatctaatagaaaccaagagagagaggaaaaacacaaaaactaaaacaccaaatcccaccacccttcacttattgtcattggcccagatttttctttccagtatctgaccttgagctgatgtcatttctgtgttaaggagagacagtatagagagatggctaaaggtggttctgaggccaggcagacctgggtttgagctcattcactggctcagtcacttctgctgtgcctcagtttcctcctgtgaaaatgagagtagggctagtgtctaacccattgagttatggtgagatgtaaattggagcaagcacatagcaccctcagcccagcatctggcacacaattggcatttctgcaaacacaagctgcagttatagtgggaggcaaagaccggatagaattttttactctgccttttcttactttgaatcatgtaagtgctgggtgtggtggctcatgcctgtagtcccagcttcttggaaggcagaggtgggaggatcgcttaagcccaggagttggtcagcctggccaacatagcaagactcccatctctaaattttttttaattattataataagcattttccatgtcactttttcctgctaatgcctacatttttctgaagtgcagacatcataggataaagccaaggtcacattcagaatggaggttccagtgtctggggcgcacctagcactcaataaaaatggctgaaaagtatttcatttattcacttatttagagttggggtctcgctctctcacccaggctggagtgaggtggcatgatcagagctcactgcagccttaaactcctgagttgaagcagtcctcccacctcagcctcccgtgtactggaactacagctgtgagccactgcacccagcaaaaaactattttaaatggctgcataatattccactgagagcctgtgccctgactgagctggccattccgtagggtctgatatttgagtagctcccatttttgtcacttttataaacagcattgctgtcaccattgccacccacacagcccgttcattccctggtgtggggagggaagggagaagagaggttgtcaatttcataaaaaatctttctgaataaagagtctgagcatttttttttcactttctaaacatgttgccagattgcccctcagaaggcctgtaccaaatttacactgtcgttggcagcattttttgacgagaactacttttcacgctaatttacagtttttctcttggatctggaattctcgccctggctggttctcctgggaggcatgaggcatatataaagatatctgagcgatggctgtcaccagaggggcgtatctggttcttctgccaggtgctcaggccgggagtgtttctgtctgctgggccaggccaggtggggctgagagcactgactcagtgctcccaatccctgcctgctgttaagccctcagagatcttctgaggtcagtcctggaacgcctcagtaccccgcggtccaacactctggcccatcctagacggatgagtctcatctggtgccaccaccatgattcctgctctcacaccctggcacttcactggggctccttgcagtaagtcaatcagctactactgggggaaaaaaaaattcctcctgggtggggagatggggacaggggccataagggaagccacgtgctcctggaaagccatagccacagcccctgaccacctgctgaactcttagcaccactgctgctgctgcctttaaactgtagcttcgctttgctgaggttctgtggtgcgcagcctctcccctagctctggtcctcctcctctgggggtggcccttgtttgcaaacagcaacaggaagttttgacgctgctgattaactagactcccacagctctcagtgctgagtcatcgccaccagtgtcaacctcccgcccgccccgctgacaccaccagcttccaggtgaccgagaggaagcagcaaggatcctgcggttccagtggcttccatctgccaccttccaagggaggggagggacaaacttccatccaccccagacaaccagaatgtgcagggccctgaatgccaggacgggaatttaatctaattcaacttcagcaatgggctgagggacagcttcatgccaggcaaagggaaaaactctttacacacaggattgcctttgctttcattcaatccccgcaacaacatgtgtggtaggtgttattattcccattgtacagatggagagactgaggccagtggaaggcctatggatgtgtaggggctgctgtgggaagatagcttggagtgccagagatggtgggtaccgccagcaggagctgtgtccccaacccacgatgtgaccttggtcagacttcctccctgttctgggtctcatgcccctccctgggtaaaggaggagggtggactggtgaccttctcagggctacagccacaaggaagtgagtgggccagctggaagggatggtcctcattctgggactctgcttgctgaaagcctgatccaagggcaggagcatcccacctcagtacctggggttggcttcactgttcacagttgcttctccaaggaactccactgaaagaaagtagttgagtggttgccagggcctgggagggagaatgatgagtgactatgaatggggcttctttggggcgtgataaaatgtcctaaagttagtttatggtgacagtgtacaactctgtaaatatactaaaaactattggattgtacactttaaacagggaatgttatggtatgataattatatctcagtaaagccgtttaagagagaaaggaagaaggaaggagggaggacaggagagagagagacctacacagaggtcaggccaagcgcgatggctcacgcctataatctcagcagtttgggaggcagagcagggaggatcacttgaggccaggagtttgagaccagcctgggcaacgtggcaagaccccatttctacaaaaacatttaaaaattagctgggtatggagtgcatacctatggtcccagctacttagaaggcctgaggcgtggggccaagcggagtggctcacacctgtaatcctagcactttgggaggctgaggcaggtggatcatttgaggtcaggagttcgagaccagcctggcccacatggtgaaaccctgtctctactaaaaatacaaaaattagccgggcatggtggcataagcttgtaaacccagctacttgggaggctgaggcggagaatcacttgaacctgggaggcagaggttgcagtgagccgagattgtgattgtgccactgcactctagcctaggtgacagcaagactccgtctcaaaaaaaaaaaaaaaaaagaagattgaggccagagaatcacttgagcccaggagttcaaggctgcagtgagctatgatcagaccactgcactacagcctaggtgacagagcgagaccccgtctctctctttttttttttttttgagacggagtctcgctgtcacccaggctggagtgcagtggcgcgatctcggctcactggaggctccatcccctagggttcacgccattctcctgcctcagcctaccgagtagctgggactacaggcgcccgccacctcgcccggctaattttttgtatttttagtagagatggggtttcgccgtgttagccaggatggtctcgatctcctgacctcatgatctgcccgcctcagcctcccaaagtgctgggattacaggcatgagccactgcgcccagccccccatctcttaaaaaaaaaaaaaaagaggtcaggccagagctgcctttgggatttgccttctgggaatagggccctcagcacccagcccctctgcaatcatccccctctaagcagcctcactccagagtccaggaaaggtgtgtgtgaagacacccagtggcaggcggtggccccagctgctgaccgagtgtgatggggccctggcctttggtgcttgccttcctcagagcggaaagagccatgaatcaaagggcaggtgtgtgtggacctgaaggaatgtggggagggtggcaagaaaacggctggaggtggagcgggagagaccccatgagtcagggtgagatgaggtgttgctcagacagggagggcctggaaacaaagcctggactggaaacaccgaaacaccgggctggccagggcgctctcagttgcctggaaacatcttaacactccagaaagtgtgagtaaggaatacctgctgcccctgaggggctcccccgaactggtccagccatgtctgcttggcagttgtggggcacaggcagatgcagctgcccaagaggcaaccccagactagacctaacgctgagccaggtgcacaggtgcaagggatccatcacgagggctaaactggccaataagaggcaggagctcattccacttgtactgtttaggcaacttgctgttgaaaaaggagaacctggccaggcacagtggctcatacctttaatcccaacactttgggagactgaagctagtggatcacctgaggtcaagagttcgagaccagcctgctcaacatggcgaaactccatctctactgaaaatacaaaaattagttgggcgtagtggtgcacgcctgtgatcccagctacttgggaggctgaggcaggcgaatcacttgaactcgggatgcggaggttgcagtgagccgagattgcgccactgcactccagcctgggcaacaaagcaaggccttgtctcaaaataaaataaaataaaatacaaaaataaataaataaataaataaataaaaggaaaaggagaagccagaggatcttggaggcacagtgtccctgtctaaatctccagataacccagaaagcacgcactgcccccacgctactccaccccctccacgcctccctgtcctatgctcttcatgcccacctcctggggcaaatggcaccggatgcccctgtcttaagtgaacaaatggagactctaaccaccttctgagaatcccagccctggggtcaaacctgcatgcctgccgagtgcctgcatgacaataattaggatttcctatgctctgaagcaaacctcccacctggcatcctgcgtgtgtccagcacctccctgcacccgggcaccactcacgcttggcatcctcacagcctctgcagcatgtgccttcagagggaagagaaccggggactcgggagactcaaggcatctccagagtcacagcctgaagacagaaccccatgctctcctggacataaaagccatgcggtccctggtagacaggtaggcagaggtgaagggatctaccctggcactgggtaggggctgtgcagtcactcctgcttattcttcctgtacatcccgctactgtcctcatgctatagatttgactggggcaggctggctgcagagtccaagtcttgaaccactgcaccacactgcctctcaagggcacagtcaatggggtaccttgtcattgtgggtcattcctcagcatgcattcagagctcttcaccatctgcctgcagccgccctgcccagccttctctcccactgaccccacaaggcaccctctttctggtctttgaatttttcatatgctccacccacacccccatatccccacctgcagccgtttacctgtgaggcccaatggaagcatcacctcctccatggggactcctgataccacctagtcagaagttccccaggaccacctccccttcccttagctcacctagcactggattcacaactgtgggggactgttagtctcctacattagattggaggtccctgattcaggctcccatgctgtgtgacttagggtaagtctctgagcctcagtttcctcattaacaggtaatatttattgagcacgtactatgtgccaggtactatgtgctaagtactctacatgaactctcccatttaatccttacagcacctatgaggcaggcactataattatcccatgttacagatgaagaaactgtcactgtcattaggaccaccatcattatcattactatcattctttttttttttggagacaaatgctctgtcacccaggctggagtgcagtggtgcgatctcagctcactgcaacctctgcctcccaggttcaagcaattctcgtgtctcagcgtcccaagtagctgggactacaggcatgcaccaacacacccagttgtttgtattttagtagagatggtgtttcaccatgttgcccaggctgatcttgaactcctgagctcaagcaatccacgaacctcggcctcccaaagtgctaggattacaggtgtgagccaccatgcctggcctattattgccattcttttgtccgctataaaacctagtgcacagcagacactcaaactcagcaaaattcaaatatggctggaactgaaaccagccttaggtaggaaggaatttcagaaacagagttctgcacatgctctaggacacgcaggcctggccctgtccaggctggggtgataccatctttggaggctgatgctggcagtctgttgtggctgggaacttggggtgacctccttttgcttctcacatcagccctgtctctacccacagaaacagactctgcccaaacaagtcctgcaatgcacagagcccggtggcaaacaagccacctggataaatggtgcccaaggctgtgggggtcctgggaggctgactggaggcagaattgtgctcatttgtaaccagagtagctccgggttgcttctgttagctcaaggccacaggtacatctctgtgcttagagatccacaccgcaccccaccaccgccacgtgttttctaggatcccctccaagcattttccaaagcccgaggggctgcttacaagactctgcccatcacccccaacctggctgatctgggaccacatcagcacctggcctgactcttctaccaggatgccctccaagaccaacactgatgccttagtcaccctcaccagggaggctgggggtgcccccacatggctgctgcacctgatgttggaaacggaggctccaaaaacgtaagtgaagtgggtattcctgctaaacactccactcggggcctgggagaaggggagcaaatatctgtctactccctcaactccacccagccatggcttgtcccacggccaagttgcctgggtccttgggatcaccaacttcttctgactctctacacacacacccccaaacacccccagactcctttcctgccactcccccacctcaggcacacatgcagtgcttggtgcctgggttaagtctgtgccctgtggcgagtgctgcccggataccccggggtccatttgaggatgaactcggctgggtcacccctgctacaaacaggcttttacattcttgaacttcacctggggtgagggtcttcaggagtgctgtcccttttcctcctgaggcctccttggtcctgatgttagtgagtggccatccacgtacccacaggaaggatgtggtcaaatcctcttaccagtggctctgaaccatttgacctgctacctgagctgctggggagaggaaaggggagggtgctcccacttctaatagttcatcaagttctcacaacatccccattcacaggtgagaaaaccgaggcccggaaagtgtcaacccaaatcacgacactccttgccccaaacccagaagcctgaggaagtaaggaagtgcggtgggatctgtcttcccgtgtgtcttcaggatcctggggcctgcccctcctggcttcctcttgaggaaggcctcagaagacccgcctttggtcacaggacagaagctgggccaagaggcaaaggttttggccgccacaggggaaactctgggctcagagctgccgaagtgactcacgggccctgctgggaagcagctgacgttccttgtctgcgccttacaaaaccacacgggctgcgagtgacagctggctgctctgagtggcggaggaatgttgttgccagacaggttcctgaggcatctgctgagctgtgctccagaaaccagccctgggcagctgccacaccaggcagcctccacccctccccacaaccaggagtcttggagggcacccccaccaacctcaacagaactctcccctcagggatccgtggaagtcagccactgccacagggacagccaccccttccaggcaggagctcatgggaaaccaagaccagggaacccatcccacccccagtaagacttgaggccagggaggttggaggggtctccctgtgaccaaatctgtggccatcacaaccgaccttgaaccataatactaagaatgataacaataataatcacagctaacccttcacactcactacatgccgggcaccatggcatggagcactttttctgaattatcacatgcattcatttcctggggctgccgtcgcaaactgccacaaactgcatggcttaaaacaacaaaaacgtattctctcggccaggcgtggtggctcacgcctgtaatcccagcactttgggaggctgaggcgggcagataacctgaggtcaggagtttgagagcagcctggccaacatggcgaaaccctgtctctactaaaaatacagaaattagccgggcatggtggtaggagcctgtagtcccagctactcaggaggctgaggcaggagaatcgtttgaacccaggaggtagaggttgcaataagctgagatcgcaccattgcactccagcctgggtgacagagagagactctgtctcaacagaaaaaaaaaaagagaagaaagaaaagaaaaagaaaaaggactgtattctcttacagctctagaggccagaaatccaaacccatggtgtcagtggggccacactcctcctgaaggcctaggagagaatccttcttttcctcttccagcttctgctggaggcgggcgatcttcagtgcacctcggcttatgggcatgtcacaccagtctctttccacctgcacatggtgttctctctgtttatctgtctctgtgtccaaatctccctcttcttaggaggacaccagtcatattggacttaaggcctacgctaatccagtatgacctctgcatacctctgcaaaggcccaaaaaggttccaaataaggtcatattcccagggttccaggtggatataaatttgggggaacattattcaactcaatacaccatgtgtaatcttcttaataagactgatattgcttttatcctcatcttacagataagaggctcagagaggttaagcaacttgccagaaatcacccagcctctgattctagaatccacactacattgtctcacccatcaccatcatcatcaccatctcctcacagaagcttagcatttcatcacttacaaagcttctcctggccattgtcacattttctttctttctttttttttttttttgttcttttctatgttttgagacagagtctcacttttttgcccaggctggagtgcagtggcgtgatctctgctcactgcaccctccacctctatctttagtagagatggaatttcaccatgttggccaggctggtctcgaactcctgaccccaagtggtctgcctgccttagcttcccaaagtgctgggattacaggcatgagccaccatgcctggtctattgttacattttcttcttgccaacaaaaccttgaggggcttgggaaacagttggtaaggaaacagtgggttccattaattaacgtatccatggtcatatagctaacaagaggaaggtctttttggttttcttttgagaatggatatccctctgtcacccaggctggagtacagtggcacaatcacagctcactgcagtgttgacctcccaggctcaagtgatcctcccacctcagcctctccaatagcggggattataggcatgtgctacgaagcccagctaatttacttttttgtggagactggatctcactatgttgcccagtctggtctcaaactcctgggctcaagggatcctcctgcctcggcctcccaaagtgctgggattataggtgtgaaccaccagcctggctgagtggcaggtcttttgacccccagatccagtatactgcactatgtaggctccaaatggagacctcgtgggaacgttccaaggctttgtaagctcctcgaggctatttgcccagcgtggtcaatgccattgctgtgtttactgataacacccacttcagctacacctgccaagctcataaaacatattgtaaacctgctgcttaaatttacctcctcaaatatcagctcctcatcccctgtctgttctctgccagcagcaaggccagctatttgagcagtgacaatgtggagaaaatccaagaatccagggggccctcacagctcacagctgagccacggagtctggggagacagtagcaggtgtggcaggtgctgttcctccagttgctgccagccaagaagggacgagatacaggcacagccccactgtcagccccactgtcagccccaccccagacgtagctccagaacggtccagtgtcttcacgttgaatgctcacaagggtcccacaaaatccgtactattggctgggcatggtggctcacgcatgtactcccagtactttgggaggccgagacaggaggatcacttgagcctaggagctcaagaccagcctgggcaacacagggagaccctgtctctacaaaaaattaaaatattggccaggcacagtatcatgtgcctgtagtgctagctacctgggaggctgaggagagaggatggcttgagcctaagagtggggtacatgacttggcgcaagcaggaggattggactccgagatatctcctgtttggacaccagcacacagcagccagagaagtcttaacatataaaggagagactgtcaccttcaaactttattttatttgtatttattttttatttttttaaattttatttatttatttatttattgagatggagtctcgctctgtcacccaggctggagtgcaatggtgtgatctccgctcactgcagcctccgcctcccaggttcaagcgattctcctgcctcagcctcctgagtagctaggattgcaggcacctgccactgcacccggcaaatttttgtatttttagtagagacagggcttcaccatgttggtcaggctggtctcgaactcctgagctcgtgatctgcctgcctcagcctcccaaagtgctgggattacaggcgtgagccaccgtgcctggcccttttatttttattttatttatttattgagatggagtttcattcttgttgcccaggctagagtgcaatggcacgatctcggctcactccaacctccgcctcctgggttctaacaatattcctgcctcagtctcctgagtagctgggattacaggcgccagcaccatgcccggctaattttttgtatttttagtagagatggggtttcactatgttggccaggctggtcttgaactcctgacctcaagtgatttgcctgccaaagtgctgggattacaggcatgagccattgcacccggctaccttctgactttaaaatgtggcaccaggcctttgcactcgctgtttcctctgcctgggatgccattccttgaactccatgcagctcagctgtccacttttcagagtgactttattttttattttttgagagacaagatctcactttgtcacccaggctggagtgcagtgcagtggtgtgatcatagctcactgcagcctcgaatccctcggctcaagcaattcccccacctcagccttctgagtagctggggctataggtgcacgccataacactcggctaatttttttattcttcgtagagatgaggcctcactgtgttttgttgcccaggcttgtcttgaactcctgaactgaagtgatcctcccacctcagcctcccaagtgctggcattatgggtgtgaaccactgtgcccagcccagagtgatcttagagttgatggctcccagttattctctaccttaacctcctggtttatttccttcattgcacttagcaaaacctatgattaccctgtttatttatcatttgcttcttaatcgtctttctctcatgaagacaagaggcaaggactttgtcttgttccctgctgactccagcgcttagcacagtgcttccacataggtcttcagtagatatttgttgaatgaataaatgaatgaattcaatagagaatacaggtaaggtgcagtggctcatgcctattatcccagcactatgggaggctgaggcagcagtatcacttgagcccaggagtttgagaccagcctggacaacacagcaagactctgcatctacaaaaaaaaaatgtctatttaaaaaattagccaggtgaggtagcacacacctatagtcccagctactcaggagactgaggcaggaggatcccttgaagcagaagttcgaggccgcagtgagcgaagattacaccattgcactccagcctgagtgacacagcaagcctgtgtattaaaaaaaaaaaaagggaggactatggagtcacagataaataacccaaagcctggcaaaagactgggctgaccattgggtatgacaaggagagtggtctgggagatgcagacccaggtagaagctggggaaatattgggagagcgaagaggggtggctgggcatcaagccaagaggacttcctggaggagaatgaccagaccttgcgaaaggatgttctgtctctggctgtagctttgcgcagggacaggaagcaagaaggaaaaccaggtaactctctgctgctttagctacagctaccaccacagagaccagaacagggaagagtttattagtccatcttctgccccaacctataacgaggacttgaattaggaggcagtgatttctagactcaaaggtgaactttcatcctacaatcctctgtgcccatttgctggcaatctttcctaagtgctgaagactaattgccccccgctgtttcttgtaggcctggggaaagtataaaggtcaaccttcttatctctactggtacatattcggggaggggtgctattataggtaggagatagctgagcaccatgacaacacttcgctgacctcagaattcctgaagttaaaaaaagaaaaaaaatttgtgtgggcattgtggctcatgcctatagtcccagcactttgggaggctgaggtgggaggatgacttgagcccaggagtacgaggtggcagtgaggcttgttcccaccactgcactccagtctacatgacagagtgagacccgtctctaccaaaaataaagattagcctggcatggtggcgtatgcctgtggtcccaactcttcaggaggctgaggtgaaaggatcacttgagcctgggagatcaaggctgcagtgagctgtgatggagccactgcactcagcctgggtgacagagtgagaccctgtctcaaaaataaaaacaaaaacaaaaactaaaacaaaaaactgcaagtaaaacaagaaaattccccaagatacaatggccatgtggttaagaaaatgggatctggagttaagcttggagcacctttcggggctgagcaccctcaggcaagcctcttaacctctctgagcctgtttccttctgtgcaaaagtaatcacttgtccctcaaagggttgttgaagagatgaatgagatcatgtacaggaagatcctggaacacagtagctgctcaatacatgggagcactccctgctggagggcctttcattctacaaaataactggcctgtcctcttttaaaatgccaatgtggctgggcgcggtggctcacacctgtaatcctaacactttgggaggctgaggcaggcggctcacttgaggagtttgagaccagcctgcccaacatggtgaaaccccgtccctactgaaaatacaaaaagtagctgggtgtggcagcgggcacctgtaatcccagctactcaggaggctgaggcaggagaatggcttgaacccaggaggtggaggttgcagtgagccgagatcacaccattgcactccagcctgggcgacagagcaagactccatctcaaaaaataaataaaataaaataaaataataaaataaataaaatgccagtgtcatgaaatacaaagaaaaactcagagactgttccagattgaaggcaacacagagcttggatttccttttgccatgaaagacattcttggagcaattgacaaaatcccaatacagtctgtagattattaggtagcagtgttgtttcaatgttaatttcctgattgtgatcattgtatattggttatgtaaaccaaaaattaaattctaaggtcccccccaaccatctgaataaacccctcctcttggccaagggcattctaacgttaacttgaaaaactggtttagactatgatggaagagggtttggacaagcctcattatactttcctcccttttggaattcaaaagtcgaccagcattaacatcaacacagaccttaagtctgataagaaacatttacaatctattcttcatctgcatgataaaaccatggtctctacaaccccttatcataactcagacatttcttcctattgataataactctttcaaccaattaccaagcagaaaaattttaaatcaacctatgacctggaagcccctgctttgagttgcaccactcttccagatggaaccaacgtaaatcttatatgtatggattgatatattatgtctccctaaaatgtatacaagcaagctgtgccctgactaccttgggcacttctcctcaggacctcctgaggctgtgtcatgggcatgtccttaaccttggcaaaataaactttctaaatcgattgagacctgtctcagatactttgggttcacagttataaaagagaatttcttgtttttaggaaacatacagtgaagtattcaagggttaagaggcattatgtatgtactgtactcttaaacaatttcagaggcaagagtctcactctgttgcccaggctggagtgcagtggtgcggtcttggctcactgcaacctccaccccccaggttccagcgattctcctgtctcagcctcctgagtagctggggttacaggtgtgcaccaccacacccggctactttgtgtgtgtgtgtgtgtgtgtgtgtgtgtgtgtgtgtgtgtgtttttagtagagatggtgtttcaccacgttggccaggctggcctcaaactcctgacctcatgatctgcccgcctgggccttgcaaagtgctgggattacaggtgtgagccaccacgcccagcctaaactactaatacttgaggaatctatagaaaaattgcgagaataaagtctgcaattatgaaagaaaaaagaaagaaagaaatgcatggttcctgcccttgcagagtcctgtcagggagagcacgtcttgctggtggcaggcttccagggagggtgatcaaccgtccaggtttgcctggggttgtcctggttttggcactgaaagtcctgcatgctggaaaactcccaggatggtcagtcagcctaattgcaggcaagctttgtagatggagatctgggtgcataagaacctctgttggtccagtgaggctccctgccttgggggagccactgagtctgcaccaccagccagaggcaggcttgtagtgggtaggctgagggcagactggacatctcagcccacccagcaagagctgggccagtggctttctggcaaaatgagatgttcactgcagagaacaagattccaagtagggctgggtgcagtggctcacacctgtaatcccagcactttgggaggccaaggcaggtggatcacttcaggtcaggagttcataaccagcctgggaaacataatgaaaccctgtccctacaaaaaatacaaaaattagccaggcgtggtggtgcatgcctgtagttcaagctacttgggagactgagatgggaagattgcctgagcacaggaggcggaggttgcagtgaaccaagatggtgcccctgcactccaccctggatgacagagcaagacgctgtctcaaagaaaaacaaaaacaaaaacagaaaaacaaaagattccatgtagccctttgcctgaaatcactactgaggccctgtaggtgcaatgaacaaggtggggaggccagccctgcacccccggtacctttttctaaggaatttttgtaaagatggggtctcgctctattcctaggttggtctcgatctcctggcctcaagcgatcctcccatcttggcctcccaaagtgctgggatgaccaatgtgagccagcaccattggcacctctcaaccaggccctctctcatcaaatagttaacctgcctcccaagcctactcagatatcactgcggccagaaccaatgagatggatggatggatgtcaacagggcacttcacaacaaaggaatgtggcctacagcacaactcaccccagcccagccctcctagcaggtagattgcccagcccttgggcaatcccaggctgctctgcaacacagatgacctcttgagggacttgcctcctgttacctgctgagcagcgagtcccacacctaagtgaggtggaggagaggcaccaccatcagtcctcatgaatcactggccaggctccttctctttgtccctccccaacaaatgccaagcatctgcactaaagcaagactctggcttgaccccagcctcaaagggaaaatggggtttgcacatggactttcggctccattcatgaaagcatagatacgtgtgattataacaaggatatgagcttggatgcagcaggctgttaaacaccatgccaggaggacgccactccatttaacccctgaggccactgtggggccagctgtgagtcaggctttgaccttggccaccttcctaatttagagtggcagctgcccacccaaattagctgccccacgttcagcctcagctctgctgttcaaatgcctctatctacttaggttctttggaaaacaattctgaggttgttttcttttcttttttgttttttgtttgtttgtttttgttttgttttgaggcaaggtctcactctgtcgcccaggctggagtgcagtgacatgatctcagctcactgcagccttgacctcccagtctcaaacaatctttccacctctcagcctcctgagtagctgggggagtacaggtgtgcaccaccatgactggctaattttttccatttttgtagagaaaagttttgccatgttgctcaggctggtctcgaactcctggactcaagctatcaatccacccaccttggtctcccaaagtgctgggattacaggcatgagccattgcacctggcttgttttcttgtttaactgtttttaagccatatatgttcaaacagtgcaaactatggtgaaaagtaagtctccctctcacccttaacctccgtcctctgcctccctcctctgagggaatcattgccaccagtggctggagggtccttccccagaatagtccccacatacaagcccacaccccaaaatgcccgcttcccccaccatgggagtccagagcacagttcacatgctatcctgtgctttgcttttcacacttcaccctgttggaaagctctccacgtcatgcatacacacttgtccttctatggttgtacttttttcaaagagtggacccaactgattgaaccagttccctattaacaggtaatcgagttatttctagtcttttgtgaccaccatacttccaagaatgcccttatacctagatcttttatctcattaaaggtggtagtgactattcctaaaagtggaactgccagtgtttttaaatgtttaaatttaaatttaaacattaaaaaatattgggttaggaaccaccactcttttgaaaatttcacgtaaaataccagttctttctcgagaaacaaacaaaacaaaacaaaataaactatgtgatgattttgcattcagttactagagggaggctcatagatggcacattaagaagtcttggtagagaggaagagaacaggtgcaggaaaattgtatccgaccctcacttccctgtgtgcataagtgttttgatttggtcatcacagaggaagctgacagtttgttctgctgagacacacagtggagttcagttctgattccaaaagtcagattcctgatcatattctgccactagagtacatacctctcaccgtggtcatactctggacctcggactcccagaatgtggctgctgagcagaagtgcgtctggggctgctccacacggtgctgcgctgggacactggggcctgctgcagaccctccctgcagctgctgccttgggactgtgaaaccagagtctgctaggaaggctctgcaactcacacgctcagttaggctttaatattttatgccagctgccaataaggactcaggtgacaagagtcacttcaggaaaggagcgtgcagaaagcatggaccccgtcatctctcattcagggtccgcatcagactaaagcgatcccacaagagaaaagctaaaaggaagcagagccgtgaacagcctgtggctggtgggagcctggcgtcagcgagctcagggtctcacttcagtgacttggcagccagtagcttcccttgggccatggccacaggccacatctcagtgtctggttggctctacgtccaaggccactgccggctgcagagacgtggtgagggctgaggccagacagctgagggccctggctgacctgctggcccattcacctgaacaaggttcacccagggcagtttccacaaatccggagcagagccagagagccagcccatgcctggcacagaggagacgctcaacacctgtcatcccttcccttctcctgcctgtccctcagagttcctggagcttccgttctgctgagcctcatgctgcccatgcgacacatcacgaccattttcaggaccacaacctccctgtcccatggccgttttctgaggtctagaagtcacccccttgggcttaagcaaccacgaggccatggatggtcacaaatttccctgggctgcactccacaaaccctccagtgggcacagcacgtgtctctcacattttggagagaaaggaactgagaactcccatttctggaaccccatgccagttctagaaggttccatcctgaagatgaaagctgatttgtcatctgtggtgtgtcccaagaaaagaaaaatacctcattttgtactgagcactaactacacaccaggtgcctattgaagcctctgaggtatgttcacttacttatttctcccaacaaccccttgagggaagttctattgttgtaccctcttttcaggtgaagaaactgaggcacagaaaggtgaagtgcttccccaaagtcatgccaccagtaaggagcaggctgggatttgtaacccaggcagcctgccacgtggcccctggccctcttggaggctcttccctgagcagcctccagaggagagaatggaagaagccactctgcgctcctcctcctcctctccttcctcatcatgagggagcccctgcctgtacaagtgctttacctgcatcatctaatgtcacctttgcaaatgccctgtgaggtaggaagcgtgcttaggtccctttctcaggtgaggatgccaacgtgaggccacctgcccggtaaggcaatggtagaccgggactcggcccaaggctgtgccgccattgaaacccaggccctctctgggtgctgcacatggaggcctgtgtgcagatgtggccatgaggaaatggtgtgagtggcaaaaaggccaagaagccaacgtgggtggcgggagggagagcttgccaaggagagctgcttgtcatcatctacctgagggtggcacctcagaagacagcctgggtggggccccgcggcattggaccagggtcccagcctgggttcttgtcccagctctaccctgatggatcccgtctctggcagacctgggcagaggaaaggccctgaggacccttcaggccctaatgctttatgatgctggagcaggaagcagggctgacagcagaaaccttggcccctagtggccttttagttaagtgcctgagtaacagcccactccctacaggaggcactcagcccctctccactacaagcccagccccctccacgcacaagcccctcaccccccagcagaaggtagtgtagatagctttactgattgagccctaactagatactaacagccacaaagctgcctctctgctagtcacttgctacggattaaaacagatgctgttgctatacccattttacagatgagaaaactgaggcccaaaaagtcagtcagctcactcaaggtcaccacagacccaaacactaggccaacttccccagtaggtacaataggcacagtgattacagaccataatacttttaaggacccataaaaacgttttaatttcacttaaaatcagaaggggaaaaaatgaacttttagggcaaagataatgatttcatatataaaattaacatattcacctttataccaatatagcaggaaaatctatttttattttttattttagtttttaaaattaagaataacctttgtttgtttgtttgttttttggagacagggtctcactctgttgcccaggctggagtgcagtggcacaatcagagctcactgcagcctcgacctcctgggctcaagcaatcctcccacctcagttccctgagtagctgaaaccacaggcgtgtgccaccatatctagctaatttttaaaagatgtagtagagatgaggtcttgctatgttgcccaggctggtcttgaactcctgggctccagtgatccttctgcctcagcctcccaaagtgctgggattacaggcgtgagccaccatgcctggccaaaaatctattttttaaatgttctttttagcggcaaaacaaactcaccaaggcaaaagtacctagggctcaggaaagtcaccatgcagccctgaataggtagaccttgaactcagatctgtttccctcccagggtcatgtccatcaaagaatcctccagcctcttccccagtatcaaagcaaccactcagggtaatctcacggagctgcagagttgacgtctgtccttggaagggtcatggccagacggccactcagccacaggcatttgcccagctggccacaatccctgtgggcaagtgtcccaggctcaatttttggccttccaagaagccattggagcagaggagctacatttctggggccaagtcattcataagagaagaggaacaaggcaagccgggaaacatgcttgcccctcaactgggagaggcaagagaagatgaccaagatcatccaaaagaacattccagcttttcttctttgcctgaaagaaaacaattgacagcctctaccagggaattatgtcctcgaaaggccaggtatagcccaggaggacagagagcactggctttggtgacaggcagatctgggtttgggtccccactcagccatttaatttgctgtgtgaccttgaaaaagtgaccttacctctctgactgttttcctttcttttttctttctttttttttttttttttttgagatggagtcttacactgttgcccaagctggagtgcaatggtgtaatctcggctctctgcagcctccccctcccgggttccagcaattctcctgcctcagcctctagagtagctgagattacaggcacccgccaccacgcccggctaattttttgtatttttagtagatacagggtttcactatgttggccaggctggtctcgaactccggacctcatgatccacccacctcagcctcccaaagtgctgagattacaggcatgagccaccacacccggcaaaaatatggaacgcttcacgaatttgcatgtcatccttgtgcaggggccatgctaatcttctctgtatcgttccaattttagtatatgtactgccaaagcgagcactgttttcctttctgtaaactgggaataatagcaatgcccttcccccaaaggatggtagtgagaattggctgaaataaaatgctttcttctatagtaaagcagttgcaaggagtaaaagccagaagaatatttattcattggtttgagaaacaaaatcattgatgccaacattcccggggccttgagtaattatgccatgggcttgcctgaaacactgataaatttagagaagccaccaaagccacagtaactgaggccacactatgaggtcagcctctttttccccccaggtctttgaggtgacagtttagacaggaggtaggaatcttgctaatgaaaggagagcctcaccttcaattaaggcgtcaccagagtgggaaattcatcagccctggtgatggtgacttacgccacacttgagccttgcaagtccaggatgacacaacccaaggcagaaaccatgaaattagaacaaaggtctaagtaataagcagacctgggagttccattcaggtgagcagggctgttgctcagcaggtgagcctgccccgccatggagactcagcgctagagtgagaaccacatctgctcacaccaggggcctgaaccctgctaaccccacggggggttctcacagccaaaagctcttgtgactcttccaataatagcaactcccacccagcgccttctctccaagagcagtgcttctcaaaccgcactgtgcacatgaatcagctgggatgttattagaacgcatcttaaggcagcggctcatgcctgtaataccaacattttaggaggccaaggcgggaggatcacttgaggctaggagtttgagaccaacctgggtgatgtgggcacaagaccccggtctctatacaaaaatactgttttttaattagccaggcatggtggtgtgtgcctgtagtcccagctactcaggaggctgaagcaggaggatcacttgaacccaggaggtccaggctactgtgagctatgatcataccactgcactccaacctcggcaacaggaaaaaaagaaaagaaaagaaagaaatacagcttaagctttagtgggtcttgagattccacatgtctgacaagctctccgtggatacagctggtgaacaatgagggcctagactttccttgggccccacagacaccttgggttgcccttcaccaggtagacctgggaaccctgatcagtttgtactccaagatttaggattcaagcaactaacagcacaactataaactggatccctcatgatttctttgggggttgaggggaaagggataggatacaaaatgaattaaacataaacatttgtggcaggataatttattgcaaggtgaattttttgttttgttttgttttgtttttgttttttttaagacagagtctcgttctgtcacccagcctggagtacagtggcgcaatcttggctcactgcaacatccacctcctgggttcaagccattctcttgcctcagcctcccaagtagctgggactacaggaatgcaccaccatgcccgtctaatttttgtatttttggtagagacggggtttcaccatgttgtccaggctggactcgaactcctgaactcaggtgatcctcctgccttggcctcccagagtgctgggattacagccatgagccacggcgccaggccctttttttttttttttttttttttttttttagacaaagtctcgcccaagctagaacgcatcagcgcaatcttggctcactgcaatctctacctcccaggttcaagtgattctcctgcctgagcctcccaagtagctgggatgtgccatcatacccggctaatttttgtatttttagtaaggacaaggtttcaccatgttggctaggctggtctagaactcctaacctcaggtgatccacccaccttggcttcccaaagtgctaagattatagacgtgagccaccgcgcctggccgcaaggtgaattttttttctcccagcatactgccctttccccaacacacacacacccttttcaggtagcaagaccctttgatgccttcttgccacagagatttttaaatttcaactaatttcagaagtcaggcactttcctttaaaaacggagggctccgggtaaagtccatcctctcccatcacccctactcctcactcacagcttcagacatccctacggatatttaggcaaaggtattttaaaagagagatgtttgcaggatcatgttggactggctcttcctttcttttattaaaaatatataagccggccaggctcggtggctcatacctgtaatcccagcactttgggaggctgaagcaggtggatcacctgaggtcaggagttcaagaccatcctggccaacatggaaaccccatctctactaaaaatacacaaattagccaggtgtggtggcaggtgcctgtaatcccagctactccggagtctaaggcagaagaatcgcttgaacctgggaggtagaggttgcagtgagccgagatcacacgactgcattgcagcctgggtggcaaagcaacactctgtctcaaatatatatatatatatatgcccaggatgccaggagggcagaggggacagtggctaccgtttcctatcttgtataagatgtagttgcagggtggaggtaaatagtgatggcaccaaagggaagcttgggggccttcagtctccccattaacttcaccaggaccccttcccctaatccctgaacacagctaaccacaacactcttcagatgtggatctcagcacccaaggggagattccctcccacaggaatgagccctgcactggggagcagaggtgtgctctccattgaggcatctgggcagggctgagctcagaaggtcttccggctgcacccaggctcctgtcccaagcacactcttcctggaagcagcccccacagactcccaggacccagagatcgggactcccatggtgtcagtatcagagactatggcatggaaatgcagggcccctactcccgactttgggtgagtttcccatcgtggtgatgtgacacctgggagggggagggaccctaaaattactgaagaggaatttatggccacctgtctctaagggagcttggggtcagacctagggagtatcagtagcattttaaaaagtggtatcatacctcctgcatacacttaatgatattcaatatttaggaatgcagttgcttttttttttttttttttttgagtctgagtcttgctctgtcaccaggctggagtgcaatggcatgatctaggctcaagttctgcctcccgggttcaagcaattctcctgcctcagcctcctgagtagctgggattacaggcgcgtgccaccacgcccggctacttttttgtatttttagtagagacagggtttcaccgtgttagccaggatggtctctacctcctgacctcatgatctgcccgctcggcctcccaaagtgctgggattacaggcgtgagccaccgcgccccgggaatgcatttatttttaaagtaatatacatactatagcttagcaacacattatcaaataaattatttgatgaaaaattgcaaaagttaccatctgtgaaaataatctcccagtattgtttcttagtggacctctcctggtcttaactattctaggctgggaaacattggtttgtccctgagcaaactgcactccctgacattttttgaacattaaaaaaattatcacaaaagttttacacattatacaattcattaattattcagtaaactcttcaccttgatccttttttcaaagtgttaaaattctgaagtctctgtaaaataaaaatacctttaaatttttatttatttattattttattatttttagagacaggttctcgctctgttgcccaggctgcagtgcagtggtaccattatggctcactgtagcctcaaccccctggactcaagcaatcctcccacctcagcctcctgaatagctaggattataggcacacgtcacaagtccagctaatttttttattttttatttttgtagagaccgggtctcactatattggccaggttggtcttaaactcctgacctcaagcaatccccttgcctcagcctcccaaagtgttgggattacaggcatgagccactgtgccctgcaaaaatacctttaggtgccatttgattgagtgttacctattggtgtctctactgcatgcaactctgcagaggaagcaattcatgagctatgctcaaacctttgtcatcactgctgccaatagcttttcccaaggaggtagatctgagaaacagagggagatccttggacatggtggtaaaattcaggaggaaaaaaaatgcaacagaaaagctgctttcttgtgctttcctctttgctaagactggctccctgcaggcccctccttctgtgagtaagaacggaggcgggttctctcttttgttctaggtacagtcatgggagagatgctgcctcttccccaaaggcacaatagcaccgatatttgaagagtcagtgatagacgatttcatcagaaggttctggcaacagaaactaccaaacgacttattttaaaaacaaaacaaaatggaaaatattaaaatccaatcagctcattgatcaccagggagaaagaaaatgaacatgtgtctcttgtactcagcctgctctaaaatatgaaactggaatgtgtttcagaaagcaacaaagatgtgagtatggaatattaaagcactatgataatttgatagtacaattttcctttgtggatttcctgtagtgaccaatattaatataataggagtgaacatctactgggtacttattacatattagcattttctatggtattttattaggttacagaacaacccaatgaggaaagtactactcttgtcagccctgtttcatagactaggaacagaggaaccgtgattcacccaaagttttgagtgattcacccaaagttttgtggctaataaaactccattccagcccaggcgcagtggctcatgcctgtaatcccaacacttcgggaggccgaggcaggcagatcacttgaggtcaggagttcaagaccagcctggccaacatggagaaaccctgtctctactaaaaacataaaaattagccagatatggtggcatgtgcctgtaaccctagctactcaggaggctaaggcgtgaaaatggcttgaacccaggaggcagaggttgcagtaagctgagattgtgccactgcactctagcctagatgacagagtgagactacatctcagaaacaaaaaacaaacaaaaactccattccagcctgggcgcctctctccaggccctcacttccaacccagaacacactagattccagagggaaacccagtcgccagcctgaagctggcattcaggttgcccttctcagggaactcaaagggtgacgcaggaattttctctgttttgcttgttttgagtcagggcctctgtcgcccaggccagaatgcagtagcaagatcatgggctcactgcagccttgaccttcctggggtctagcgatccttccacctcaggctcccaaataggtgggactacaggcattccactacacccggctaatttttgtatttttggtagaaacaggatttcaccatgttgcccagtctggtcttgaactcctgggctcaagagatcctcccacctcagcctcccacagtgctggcattacaggtttgagccactgtgcctggccagtgcaggcattttctccttggcccttatcagcttggtggagctaagagcattattttctcctgatgaagagctaagcctctgggcagaagttgagcagcccaggcaaggtcaagaagggaatgaatggtagactttctggtctcaggctgcaaattccttctgtctaatcgaactaccccaaaaggcacaaaaagaaaacaaaaatgtaccctcttgctccaaaaccattctcctggctttctcagccctttatgggacatctcagccctttatgtatttttgttcttatttttttgagacagggtcttgctctgttgcgcaggctggtgtatagtggtgccatcatagctcactgcagcctcgaagtcctgggctcatacaatcctcccacctcagcctcctgagtagctgagactacaggcacacaccatcataagctgctaatttttaaaatttttttgtagagatagggtcttgtggtatagcccaggctggtctcaaactcctggtataaagtgatacttctgctttggtctcccaaagtgttgagattacaggtgtaagccactgtaccttgcctcatctcagtcctttaaagatgcaccggaggctctgctagtcattagaaaccagtgcatatagtgtgtgtgtgtttgtttatgtgtgtgtatgtgttttgtaagggtgacagagttggcgagtgagggcaacaaccaaggaattcaatcaactcaatagagaaaaacattacatcactgacaatgtagcagcagggccaggtggtggctcttgcctataatcccagcacattgggaggccgagacgggtggattgcttgagcctaggagtttgagaccagtctgggcaacatggcgaaaccccgtctctactaaaaacacagaaattagccaggcatggtggtgcaagcctataatcccagctattcaggaggctgaggcaggagaattgcttgaacctggaaggcagaggttgcagtgagccaagatcatgccactacactccaacataggtgacagagtgagactcagtcaaaaaagaaagaaagaaagagagagaaagacggaaggaaggagaaagaaagaaagaaaagagaaagaaagaaagagaaaggaaggaaggaagaaagaaagaaagaaagaaagaaagagtagcagtaaacatgagactagttgccatagcaaccatttaattgacattttcattttcccagcatttgttctgggcaggtgtgggcagacatgtgtcctcagggatgtgcaaggatgagggtgtgtctgtttcccccattagtcttcataattgaaggggttggtactgctcctagacaaggccttgggaatcgggactttaacagtgcacagaaaaccccgtctgagaacatccacagcaggcagagccaacctcaccgtgtaaaggcagtggaggtgatggtgaacttgcttgctgcgtggatgggatgctgaggctcaagtggagggccatacagattggccttggcagagcgcagcccagacccaggtccgctaactcctggtgggccacactggcttgaagccacactggcttgctgaaccagggtcaagtagccggggttaggggaaaaaatataagacgaggaagaagcatagcacagcttaaatccatcgagagtgcagaatcacctttcatcttctgaaggagcaattgttttctgtaccaaaccacacaatgcaagcaaatctgctgccaaagaacaaagagaaaaatgcagggaacaagcagcttcccaagcctcgcagccggggatggaattaaattcaaattcacctgcaagagcagctgatggttcagctacaaaccgcctccaagcagcctctgagattcaaaattcatgcgccctgcgaactacacagcatatactagtggcagccctggctgggtcctcgcagccacgcaatttttgaggatgacacacatggaatactaaacatatcccgggagttccagacacagccacctagttacagcccagcctgctcttgtctgcagcaatttttctcaaaggtgcggcttcatgcatatctattaccaagcacacgtagacaagacggtgttcggaaagcacagccccgagtgggaaacaggagctgtcagcaaatcattttcacaggaacaggaaaatctttacgtggaaaatattgctttgggacttccccgggaggaaagaacgagctgaaattgatggtgttgcagcttccattttccaaaaagcaaaatgcttttaagaccatcagggttacgcttgatcatagctttgcttaatccatttcttcacgggttttgcccttgtcatctttgcttcctgaaccactcctgcaccttacagtcaccgcaaatcccatcccataaaaatctgtggcgtctctgtgtgtggaaatcaaacaacaaaaaggcaccgccatgtgtagctgcgttacgctttcggtggaaagatgacatggatgaaatggcccctgggaaacactggggaggcctgactagcaaggtgcagagtgggggattaatggggagatacacagggcctcttactaaaactgagaatagcattctgttgaagaacccttattttgaggctgggcacagtggctcacgcctgtaacatcagcacttggggaggccgaagtgggaggattacttgaggccaggaggtcaaggctgcagtgagttatgatcaagccactgcacttcagcctgagtgacagagggagaccctgtctctaaaaaaattaaaaagaaaccatatttggggtgatgatatccatcccctaaaataataaagattagctgggcacagtgactcaagcttgtaatcccagcactttggggaggccaaggcgggaggatcccttgagctcaggagttcaagactagcctgggcaacatggggagaccccatctctacaaaaaggaaaaaaaaattccaggcatggtggtgcacacctgtggtcccagctacttgggaggctaaagtgggaggatcacttgggattgggaggtggaggctacggtgagccatgatcatcccactgcactccagcctcggtgacagagcaagaccatgtctcaataatgataataataataaaaagattatttataaatgtctctgtaactgaaacaccccctcaaaaaaatcctgtaaattggagaccttacctatcatcgttcccttcattttattttaaatttcattgaaatttatcctaaagcacttcctgtgacttgaaaatgcaggcattttggctaacattattattcatttctttacatttgaatgtaataaacgtgtcaggtttatttatctgaacttaaatctaagttttagtgattttttcccccctggatctaaaattccatcattcttgagcaactcatatttgtcaatttgacagcttctccactattttaagcactttccttttcatcaccatccatttccattaacaactccactctccgctgcctaacagactcctggaactgactcctcaaattggattgtcccctcgctggcccattcctccccagccttcccagtctcagtaaatggccacagttgctctagtcagaaaacctagcttagccagccaaggtggctcacacctataatcccagcactttgagaggccaaggtaggcggatcacctgaggtcagcagttcaagaccagcctggccaacatagcaaaacctcgtctctactaacaatacaaaaattaaccaggcgtggtggcgcgcacctgtaattccagctgctcaggaggctgaggcagaaatattgcttgaacccgggaggtggaggttgcagtgagctgagatcgagccactgaactccagcctgagtgacagagcaagactctgtctcgaaaacaaacaaaaacctagcttgccagacacagtggctcatcctataattccagctactaggaaggatccttgagcccaggagtcaagactagccagggcaacatagcaagaccctgtctgtaaaaaaataaaagttaaaggctgagcacggtggctcatgcctgtaatcccagcactttgagaggccaaggtgggcagatcacctgaggtcgggagttcgagaccagactggccaacgtggggaaaccccgtctctactaaaaatacaaaattagccggccatggtggcgcatggctgtaatcccagctactcgggaggctgaggcaggagaatcacttgaacccaggaggcagaggttgtagctagccgagatctcgccaccgcactccagcctgggcaacaagagcgaaactctgtctcaaaaaaaaaaaaaaaaaagttaaaataaacctagcacaggttctctccctcctcaccccagctgtcaccaagtcaaatgggttctacacgcaagacaatgtcaaacctggccacctcccacctttgtcccagatgtctttggaagcctcaccagcagatactaggcttcctgtgtccacactccggctttctggcgatcctcctccaccaggcagccagagggaccttgtgaaggcatagcttcaaccctgtcacgttctgcagtctcttcttcagcaaatatttgcacacctactctggacagtgctgttctagcccttgctggaccttgcgttatcagcagagacggaacaatagacgaaaatcaaagagtgaaatttagagtgtgatagaggaccgtaacagtggtggaaaaaaataattcaaaggaggacatggagggatgggtggctgaattttttccagctcttgaagtagggagttgtaatttctagtagggtggtcaaggaaggccccactgaaaggggcatctgagacctgaaggaggtagggaagtgatccacaaaacacccagaagagctgccaccctcctaaagttccctattacattaaaatgaaacccaggccaggcgcagtggctcacgcctgtaatcccagcaccttgggaggttgaggtgggtagatcacttgaggccaggagtttgagaccagcctgggcaacatggtgaaaccccatctccattaaaaatacaaaaaattagccaggcctggtggcatgtgcctgtaaacccagctgcttgggaggccgaggcaggagaattgtttgaagccgggaggtggaggttgcagtgatctgagatcgtgccactgcactccagcctgggggacagagcgagactgtctcaaaaacaaaaacaacaacaacaaaacccagaatgaaacccaaactctttcccatcgcccatgagaccttatagcatttgccaagggcctctcaaatgcgcgttgccctcagttccagctctccagctgcatgagtctcttgtgtctgtcaccatgccaggctctccccatttcaaggtcttggctctggctgtccccctgtctgggacaccccatccaccccccacacaccccatccccacctcctcccctcttctcaagggtggctcctgtctttctactcttaggccttaaaaatgtcacttcctcggagaggccttccctgaccatccccaccggccatctcctgccttctccctgcgtttgaatctcctcatgcttccttagccaggcatggtgatgtgcacctgtaataggtcccagctacttgagaggctgagtcaggagaattgcttgaacctgggaggtggaggttgccgtgagctgagatcgtgccactgcactccagcctgggcaacagagcgagactccgtctcaaaaaaaaaaataaaaaatctcctcatgcttcttagcgctgtctgaaatgatcttgttcactaactgcctcccccacctggaatgcaagctccagggggtcagaaatgtgcttgctgggccagggtcagagccccctgtgtctggaacggtatggagtggacattcactgcatatttatggagtgaagaaatcaatccatcaagtagaactgggtaacaaacttgtaaataattcatgcagtccagtgcagcagagcgggaatcactcaaaaactcacatccaatgccagcctcaggctccaccattttatcaacaatgagaacaacaacagcagcaaaaataattcaataataattcaataattcaatttcgtaattcagtaacactgttcaatcagactaacaacttgggcattgactcgaagcctctgtcgtttgctttctcttttcatcccataacaacccattattatattatcttattataacatcctaataatagcccattattctcattttaacaggtccaaaaactgaggtttaggagatgttttgtggctgagatcacacagccagtacagagagagttcaggtcccaacactaggccacacaattatgttccaattcctctaaataaatatcatagagcagccgggcacagtggctcatgcctgcaatcccagcactttgggaggccagggcaggaagatcgcctgagggacaggagtttgagaccagcttggccaacaaggtgaaaccccgtctctactaaaaatataaaaattagccaggcatggtggtgcaagcctgtaatcccagctactcgggaggctgaggcataagaattgtttgaacccaggaggcagaggttacagtgagccgagatcacaccattgcactctagcctgggcaataagagtgaaattctgtctcaaaaaatatatatataaatataaatgtaaataaataaatatcatacagcacctactctgtgccaggaactgtgtataaaagaatctcacaggcaaatcagggcaaaatatttcagacaaaaggattttcaattaattctgaaccacttgacagagattcaaccatgagacagtcagaatatgaacactgaccacctttattgggtacttcctgccaacaaggccttggaccgcacacttcacctgctttgcctcatcactacttactgttggcccatttcacaaaggaggaaactgagatacaggctggtccagtgacttgctcaaggcccttgccaggaactgatggcgctgggttctgatgccctggtgccctggctgcatagacactcatcattagaaaaatggggtggtcagcctgtaatcccagaaccttaggaggctgagacaggaggatcacttgagcccaggagttcaagactagcctgggcaacacagcaagatcccatctctaccaaaataagacacaaacaaacaaaatccctggtgctcagtgagtcagatctgggcagttggcaggagcttctgagggtatagaaaatactggaaatacctaaattgaatacctttagacatgtttgcaaggcctaaaggaaaacatctatactccaccctggagatgtttctttccttggccgggcatggtggctcacgctcataatcccagcactttgggaggccaaggtgggcagatcatttgaggtcaggagttccagaccagcctggccaacatggtaaaaccctgtctctactaaaaatacaataattagttgggcatggtggtgcacgcctgtaatcccagctacttgggaggctgaggcaggagaattgcttgaacttgagagatgaaggttgctgtgagcaaagattgcaccactgcactccagcctgggcgacagagtgagaatccatctcaaaaaaaaaaagaagtttctttccttgatctaaaggcagcgtaggctggacgcggtggctcatgcctgtaatcccagcactttgggaggctgagacaggaggatcatgaggtcggagttcaagaccagcctggccaacatggggaagccccatctctactaaaaatacaaaaattagctaggcatggtggcaggcgcctgtaatcccagctactcgggagggtgaggcaggaaaattgcttgaacccgggaggcggaggttgcagtgagccgagatcttgccattgcacttcagctttgggcgacagagcaagactcagtctcagggaaaaaaaaaaaaaaaaaaaggcagcgtaaacctattggcaaggtctggtgaaggacccttacctgaaagccatagcctcgtgtctctgagatcaggatgcaccctggggagggggattggagttcagcaagaatatctttgttggaggtgctggagctgcgccagtgccagccgggggcctcctcctggcctgtgctggggtctctgtcccactctccccaccgccccctccgcaggccccaggtgtttgaacagagccataccagggctggaactacaaacatggtagtctgcagcccgtctcgctctgacagtctatgggagcacagtcttctatgctggagcccacagcagcctgtgccctggaattttctgcttggttcaccaattcctagacagaccctgcagcggctgtggtgttgaacaaggcaggcattcagtcattagttcagcaattaaaaggcttagaggacaggatcttcagcttccaggaactgacccaggtcaccagcaaggttcttgaaatgttaccctttgggttctttagccagtgcgtctcctctgcagcccatatggtcttgagaagaattagaatttttatagcagggagacaaaaattaagtgacctaggctcctgatatccaagtgggcattcaagatgtccacgctggaactttgattttcattccccacaaatctggtttctccttcagccttctcatcccagctaatagcaactgcatcctttcagtgactccgtgcaaaccctgcaggtgcagccttcatgttacaactcctgccggctctaccttcaaatattatccagaatctgtccacttctcaccactgccagtgcccccaccatccctccctggactcttgcgatagtccttgaccagctgcaatcacctcgcaactcagcggcctgactgatcttgttaaaactgaagccaatcacgtcactcatctgctcaaagccgtctgtggcccccatatcgcttcaagtgaaaaccaaggttctgcagtggccctcaagccctctctgctccaaacctcctatccctcccaacacctttgctctgctcctaaaatctgccagacagcctcagggcctttgcgtgggttcttccacctcggacattctttccccaaatatccacagggctctctccctccctccacacctgctcaggcaggtgttcctcaaggagactctccctgatctccttagttaaaatcacaactcactcctcatcttccacctctgccccaagctctttgcaccccttactctgctgttggattggttgattggtttttgttttttagtcttcgcacttaacaccttccaacagacaaaatgttgatgtatttttgtgcctgttatttattccctgttttcctctgtgagggagagtcacctctgagaggtgaagatctttttctacattgtttgccagtgtctcctgggcactggtagagtttaaacttacagagggttctttaagatttgtgaaaggaaggggctgccccagagctgtggggtttttgtcaaaacaaagctgagaaagagaacagaggaaatgcatttgacttccctgcccctcaggagatgagatgagggaagagtagacaaggtgaggggcctggagacccaaccctttcatgccaagacacttataagcctgtgcccactccctccccaccagagcaggaagaggctggacctccaggggctggtgatggcctggtggagggagaactccacccctctccctgggtggggctgggcagtagaggaccacacccctgggtcctttgctgcccagagagcactatggggctcctggttccagacctaaagccaggccgggagaagcagacaaagccatgagatacacatcttttccctacctgtggcctcccggctgcctccaacctggacacagggctttgcagtctttctaaatgagaatcctgatggctgaagaaggcggatggtggagggtgacctaacagaagagggcttgcggcagacactggaatgcgatgttctgctgggaaacccagccacctgggcggagatgcctggaaggcgctgttcagcccagcaggtgcaaattctcatgtcaaaccctttaaggaagctgctcgcagacagcccatcctccctcctttctcccccactccatctggttgttaacgagaatgagaaaagcagattagaagtgtcacccctgcagctggttcaaggctgtacaaccgatccactttcgtttcattctgataggtacaatttctttcccaaacaaacactcacgtattgggttttgagaaaccttctacttatatgaatttcatgagcttgactgtgacctgggataagtctttatgagcaaaacaaagaaatgacctataaaaagaagtgtgttttcctttgtgattctgtggcataagaaatatatttaggcctggtgcagtggcccaagcctgtaatcccaacacttcaggaggccaaggtgggcagaccacttgaggccaggatttcgagaccagcctagccaacaaggtgaaaccccatctctactaaaaatgcaaaaattagccacgtgtgctggcgaacacctgtaatctcagctactctgggggctgaggcatgagaatctcttgaacacgggaggcgggggttacagtgagccagatggcaccactgcattccagcctgaggtgacagagcaatgaatctgtgaaggaaggagggaaggaaggaaggaaggaaggaaggaaggaaggaaggaaggaaggaaggaaggaaggaaggaaggaaggaaggaagggaagggagggagggagagagggcggggagggagggagggagggagaggtggctcacacctgtaatcccagcactttgggaggctgaggtggaaggcttgcttgagcccaggagttcgagaccagcctgggcaacacagtaaaaatcctgtgtctataaacaataaaaagtaattttgaaaaaattgtaggacatgcagctggtgtcacagagaatttattggtgtggggaagaaacaacacacatttggtgttaggagtgttccatggatagaaaaagattagagattccacaaattgattctgtcaatttgtggaattgacacaaacacacagggctgcccaattttctgttataagcaggggaggggagtcctgaaagagatttgcagatgatataaatgcgtaagagaacattgagacttttctttccctttggccttattgttcaagaatatatttttagattaagtccagatgccagatgaatttgtgtgtgtgtgtgtgtgtgtgtgtgtgtgtgtgtgtgtgtgtgagaccgagtctcactctgttgcccaggctggaatgcagtggcacaatctcagctcgctgcaacctctgcctccgagattcaagcaattcttgtgcctcagcctcccaagtagctggggacacaggcgcaccccaccacatctggctaatttttgtatttttgatagagatggggtttcaccatgttggccaggtgtgtcttgaaatcctgacctcaagtgatccacctgccgcagccttctaaagtactggcattacaggcgtgggccaccatgcttggcctggatgccagaagagttatttgcaaaacaatttttaaatacttttaaatactttgtaaagaagccaaagttttattgttgttattttctgtctaatgccttgaagttgccatacattttggagattctattaaagctataagctcgttttgttcagatgaacattcatttgtttttatgatcaagcaaacagagagtggtttaactggcttaagaaggaccacacagaaagccgaaattcaggaccagcattgagatgccagcatggaggccccgtgtggtggctcatcccagaactttgggaggccgaggcaggaggattgcttgaggtcaggagttccagaccagcctgcacagcatagccagatcccatctctacaaaaaattctaaaaattagctgggcgttgtggtgcatgcctgtagtcctagctattgggaaggctgaatccagaggatcccttgagcccatgaatttgaggctgcagtgagctgtgactgagccactgccactccagcctgatagacagaataagacctgtctcaaaaaattaaaattaaaagacgcccatatgaagctaatctccgattctgtgtgcagactgctaaaatgtctctcttgctaaaaggaagccctaagaatggctacacagggtttttaacaaaaagatttagcatgtcttaggacttaatgcatgtgccaccttcaggcagccataacaaaaaactagaggttttctctaaataaatacataaaaataaggaatttagattctctggcaactgtgaccttaaactttgttttcaaggtgaaaaatattcacataaaattaagctttatgagaacatttctatgatgatttaatttcttctctcttccccggttccacttaaacactaatcctagaatcctaaaactgttcttcctgtagatgtcatggtaagtaccacactttttctgtgcttttccataagcagagaacaatagtagctgagtgatcagacagtacagagattaacagaggagttagtaataagctttagaggtttatatctgtggctctactcgtctaaatttaagcctttttggggacagaaacccagttaaccaatttaaggcaactaccatcacagtttcttgataattggtgatctcagtagaaagggtacgttgtaaataaacaaagcaatgaaacccagatttcattcatcaatgtatcccctacagaccagtttaatggagataaattaccttgtagataatgacaatgcaaacttaacacacatcagatcgattgagacaaactgctgtgtgtgtgtatctgtgacggcctttactttgttattactgatttaattattttaaaacccttattaagtgctctgtgggttcatagtggcacttctctaaaaatctgaaagtcaatatagtcttttaaactacagagttggtgccctttgtcttatgaagggaaggagaacgtaaactcactgcctctagaagataggggtagaggtgtttagaaaatagttaatggggccaggtgtggtggctgatgcctgtaattccagcactttgggaggccgaggcaggcagatcatctgaggtctggagttcaagaccagcctggccagcatgataaaaccccatctctactaaaaatacaaaaattagccgggtgtggtggtgtgtgcctgtaatcccagctacttgggaggctgaggcaggagaatcacttgcacctggaatgtggaggttgcagtgagccgagatcatgccactgcactccagcctgggcaacaagagcaaaactccatctcaacaacaacaaaaaatagttaatgggccgggtgcagaggcttccacctgtaatcctagtaatttgggaggcttgaggggaatcagcctcgaaaagtaggggaatcacttgaggccaggagtttgaggctgtagtgagctataatcgtgccattacacttcagcctgggtgacagagcaagaccctttctctaaaaaataaatagtaataataaaagccaggtgtggtggctcatgcctataatcttaacaccttgagagactgaggcgggagaattgcttgagcccagaagttccagaccaccagcctgggcaacatagcgagaccctgtctctacaaaaaattgaaaaattagccgggcatggtggcatgcacctgtagtcccagctattcaggaggctgagacaggaggattgcttgagcccaggaatttgaggctgcagtgagccatgattgagccactggactccagcctgggggagagagtgagaccctgtcacacacaaacaaaataatataatacaataataataataataaataaaaataaattttaaaaagggttttttttttttttttttttttttgagatggagtctcactcactcttttgcccaggctggaatgaagtggccctatctcagctcactaaaacctccatccaccaggttcaagcgattctcctgcctcagcctcccaaatagctgggattacaggcgcctgccaccatgcccggctaatttttgtatttttagtacagatggggtcttgccatgttggccaggctggtctcgaactcccgacctcaggtgacccacccgcctcggcctcccaaagtgctagtattacaggagtgagccgctgtgcccagccacaaaaatgggtctttttcatacattgtacggagttctccgcaggcccttccagtgcttcagctgtgggaagttttcctgtgttatttcattgatattctctgccctttctttgttctctctggaattctttgaaattgctgatttgatttcaacttctttccttccctccctccttccttccttccttccttccttccttccttccttccttccttccttccctccctccctcctttccttccttccttttcttgacacgatcttgctttgttgcccagactggagtgtagttgtgtgatcaccgctcactgcagcctcaagctcctaggctccaggcatcctcccacctcagcctcctgagtagccaggattacaggagtgtgtcaccacacccggctaatgtttttttaatgttttgtagagacgggggtctcattatgttgcccaggctggtctcaaactcctggtctcaagtgatcctcctgccttggccttccaaagtgttaggatgaccagtgtgagccaccatgcatggcctattatttttcatctctctctgtttgttctagttcctggaaaatttcctcaacttcatcttccaatccacttactgatttttcccctcatattaaaaacacatagatttttcttgtgtttattttattttatttttccttatccctggtaatatctggagattgtcttggttttgaatattcatttattcaatagcatttcaagagtgtaattgcctcttgtctctggaactattataatattcgttcgttcattcttttttttttttttgaggcagagtctcgctctgttgccaaggctggagtgcagtggcacaatcccgactcactgcaacctccgccttccaggttcaagtgattctcctgcctcagcctcctgagtagctgggattacaggcctgcaccaccacacccggctaatttttgttgttgttgttgttttcgagatggtagtctcgcactgtcgcctgggctggagtgcaatggtgcaatcttggctcactgcaacctctgcctcccaggttcacgcgattctcctgcctcagcctcctgagtagctgggattacaggcatgtaccaccacactggctaatttttttgtatttttagtagagatggggtttctccatgttggccaggctggtctcaaacccctgaccacaagtgatcctctctcctcggcctcccaaaattctgggattacaagtgtgagccaccacacccagctcattctttcttttttatttcttcctttctttctttccctagattgtctattttctttgtctcttttttcctgcttattttattttggtctcacttttatgttagagacaaactgtgagattatccttggctttctgttcatatttaagatgagacactaacagtcagtcggacctgtatgtgggggtggagcttgtgactggaggactttgctgcagggtgatggacccgggccttggagcactcattggagggtcctcattgtcagttttattagttcctttctccagagctgatttgtttccccagaagtgaatcaccccacctcctgcctcatcatcagctgtaaccctggctgccaatattctgagacctaagagaaggcaggaggccagaggtctcagtgttctgagtgagtttcacatcatccctgggtttcgggtgcggtgcttcctcagctctcacctctgggccaggtgttccaaaatccagattccttaacacctttcgtctactgtttttcctcttctattatctttatccttatggatttttactttttaaatcctttacaatcatttcatttgggttcaggaagggatggaaatgaatgcaaatattccgtcttcaactagaagtcctatacattaatatttgacttcaagaggtttagttcaaagcacatttagattaggagtaaaaattgttctgtaagctcccgtgagccgtgagccaaactaggggagactaaaggaacctatctagcgaaaagattctatattccacttaaagggatcgaatagcaattctaagtagactgtcaaaagctaaatatgtatattgtaattcctagagcaattttaaaactttccttgtagaatttcttttttgtatagaagacatagaaatttttttgtacagaactaaaattagtatgctatagtatatttctttgtacagaagcactatagaaagaaatatatacctagaaaatcctgaagacaaggaaaaaatgttaaaacaattttaaaataagaaatataatcaaaacccaatagataaattaaaatggtatactaaaagtattcaaataatctgcccgggcgcggtggctcactcctgtaatcccagcactttgggaagatgaggtgggcggatcacctgaggtcaggattttgagaccagcctggccaacatggtgaaaccctgtcactactaaaaatacaaatattagctgggcatggtggtacatgcctgtagtcccagctacctggacggctggggcaggagaatcacttgaacccaagaggcagaggttgcagtgagctgagactgtgccactgcactccagcctgggtgacagaacaagactccatctcaaaataaaataaaataaaataaaataaaatagtattcaaattatctaagagaggataagaaagggcaaacagaaacaaaacatagagggaacaaacagaaaacaattcattggtgaacccaaattcgagcatattaataatcacattaagtgtaaatagtctaaatacaccaactaaaagaattttttaattttaattttagtttttaattttgcttatttatttatttttgagacaaagtctcgctctgtcaccctggttggagtgcaatggcacaatctccgctcactgcaacctccacctcccaggttcaagcaattctcctgtctcagcctcctgagtagctgggattacaggcgtgcgccaccatacccggataattttttgtatttttagtagagatggggtttcaccctgttgtccaggctggtctcgaactcctgacctgaagtgatccaccctcctcggcctcccaaagtgttgggattataggtgtgagccactgcacctggccttaatttttatttgattattattttttgagactgggtctcgttctgccacccaggctggagtgcagtggtgtgatcatggctcaatgtagcctcgacttcccaggctccagcaattctgccacctcagcctcctgaggagctgagaccacaggtgcacaccatcacacccagctaatttttgtatttttgctagaaatggggtttcaccatgttgctcaggctggtctcaaactcttgagttcaagcgattcacctgcctcaccctcccaaagtgctgggattacaggtgtgagccaccatgcccagctggaaattgttaaattgaatttttgaaaaaactcaactacgtgatgtctaaaagaaaacccactttatatataatgatataggtatgttaaaagtataaagatggggccaggtgcggtggcttttgcctataatcccagcactttgggaggccaaggcgggcaaatcacttcaggtcaggagttcgagaccagcctgcccaacatggcaaaaccctgtctctactaaaaatacaaaaattagccagccatggtggcatgcacctgtagttccagctacttgggaggctgaggcaggagaattgcttgaacctgggaggtggaggttgcagtgagttgagatcgcgccactccactccagcctgggtgacagagcaagactccgtctcagaaaaaaaaaaaaaaagaaagaaagaaaattaccacagatagaaacgtgagcaacaccatcaaccaactggatctaactgacattcctggaatactctacccaagaacaacagaatatattcttttcaagtgccctgggtcataaaccaaatctcaacaaatttaaaagaaattaaatcatataaagttattccctgaccacaaaggaattaaactagaaatcaatagaaaaatatctggaaaatctccaagtgcttgaaagttacacaacacacttctaaataatccatgaatcaaagtggaagttttggctgggcacagtggctgacacccgtaatcccagcactttgggaagtcaaggcgggagaatcatttgaggcttggagtttgagatgagcctgggcaacatagcaagatgccatctctacaaagaataaaaattaaaaacaaaataaaaaaggtgaaaggggttccccctccccatttctttcttttttttttttttttttttttttagacatggtcttgctttgttgcccaggctggagtgcaatggtgtcatcttggctcactgaaaccttcgcctcccaggttcaagtgattctcatgcctcagcctcccaagtagctgggattacaggcgtgccccaccacgcccagctaatttttgtatttttaatagaaataggatttcaccatattggccaggctggtctcaaacactgggcctcatgtgatctacccgccttggcctctcaaaatgttggaattacaggcatgagccaccgcacccagccaaaaaggtgaaagtttggatagaaattgggaaatatttaaactgaatgaaagcaaaagtacaacatataaaaatttgtgagattcaggtaaaaagtacttagtggaaaatttataacatcaaatgcttatcttagcagagaaaaaaaagctaagcttccaacctaagaaactatcataagaacaaaataaattcaaagcaagcagaagcaaagaaataataacattaagagcagaacttggccaggtgtggtggctcaggcccgtaatctcagccctgtgggagaccaaggcaggtggatcacttgaggtcaggagttcgagaccagcctggccaacatggcaaaaccatgtctctactaaaaatacaaaaattagctcagcgtggtggcacacacctatagtcccagctactagggaggctgaggcagaagaatcgcttgaacctgggaggcagaggttgtagtgagccaagatcatgccactgcactccagcctgggtgacagagtgagactccatctcaaaaaaaaaaaaaaaccaaaaacaaaaacaaactaacaataacaacaaaaaacaaaacattaagagcagaaattaataaatggtaatggaaataaggctggacgcagggggctcacaccagtaatcccagcactttgggaagtggaggtgggaggatcacttgagcccaggcatttgagaccagcctgggcaacatagcaagaccctgtctgtatataactaaaatttaaatttaaaaaaaaagaaaaaaaaaggctgggcacagtggctcatgcctgtaatcccagcactttgggaagccagaatggatgaattgcttcagctcaggagtttgagaccaccctaggcaatatggtgaaaccctggctctaccaaaaaatacaaaaattagctggcatggcagcacacccctgaggtcccagctattcaggagggtgaggtgtgatgatcgcttgagctgggaggtggaagttgcagtgcattccagcctgggtgacagagaccgtgtctaaaaaaagaaaggaaggaaggaaggaaagaagggagggagggagggagggaggaaggaagggagggaaaaaagaaagaaaaagaaagaagaaagaaaaaaagaaagaaagaaaagaaaagtgtaaaaagaatagagaaaaaccaataaacccaaaagctggttctttgaaacaatcaattaaaactgctagctagactgacaaagaaaaagagggaagacagaaattatcaatatcagaaggaaagtgtgtatataataaagacctcacagatgttaaaaggataataaggaaatattacaaacaactctgtgcacataagtttgacaatttagatgaaatggaccaattccttaaagccacaaactaccaaacccacccaagaagaaatagacagactaaatagtcctatatccgttagaagaaattgaattcatagctaaaatccttccagaaaagaaaacttaggtccagatggttttactggtgaattctaccaaacatttcaagaagatataacaccagtagaacacttcctaactaattgtgtgagcccagcattaccccgataccaatgaatctgatggattgctatttattagtaatgcctacaactgaccacataccacaaaatccacctgcaaaagatacagcagtgctttaattccaaggcagagcagcacaggcccactctccctgtgtgctgtgtgtcttccaaggatcttcagagaaggatatattcttctggtttctgccaacattctcaggaaagagtaaacgtgaaggtcaggaatcgccataccttagatactggcttcttcttccttagcacagcctgtttccaaatcttgttccagggcccctgacttcagcttggcctcctgagactcttagcccatttctgactttcgtaagtctcccagaaccccctaaaacctttctttttttttttttaattatactttaaattctgggatacatgtgcagaacatgcaggtttgttacataggtatacacgtgtcatggtggtttgctgtacccatcaacccgtcatctccattaggtatttctcctaatgctatccctcctctagcctcccaccccctaacatgccccagtgtgtgacgttcccctccctgtgtctatgtgttctcattgttcaactcccacttatgagtgagtatgttcagtgtttggttttctgttcctgtgttagtttgctgagaatgatggtttccagcttcatccatgtccctgcaaaggacatgaattcatccttttttatggctacatagtattccatggtgtatatgtgccacattttctttttctttttttttttatttcttttctttctttctttctttcttttttttttttttttttttttgagacagagtctctctctgtcgcccaggctggagtgcagtggcacgatctcggctcactgcaacttccgcctcctgggttcaagtgattctcctgcctcagcctcccgagtagctggcacatgccaccccacccgactaatttttgtatttttagtagagatggagtttcaccacgttggccaggctggtctcgatctcctgaccttgtgatccacctgcctcggcctccaaaagtgctgggattacaggcgtgagccaccgcgcctggccccacattttctttatccagtctatcattgatgggcatttgggttgtttccaagtctttgctactatgaatagtgctgcaatagctttctttttttagctttcctgatactgaatgagcaaagaaatttagcttcttttagtctcagagcctcattgcaatccaaatgtccattatatgtcttcccgggcgcagagcacttcgcccctaggagaagaagccttcccttccccggaacacagaaatagctgaagccaattttagttttttgttttatttttgctttttgttttgttttgatttttccttcctgtctcatttcagtaatagcagaaagatatccaatataaggtccgtgaaccatttatagaaaattaaagtgcacctcatgacagtcagtgcacatcatgacagccagcattgtctttctctggagttctgctccaggtgtataattgcatgtcattaactttctatatctcaccaattcacaaacatagctttttttttaaccatcccctcccttaacaaatttaaatttacataattgaggccgggtgcagtggctcacacctgtcatcccagcactttgggaggctgaggtggacggatcacttgaggtcaggaggtcaagaccagcctggccaacacggtaaaacactgtttctactaaaagtacaaaaaagattagctgagcgtggtggcacgtgcctgtaatctcagctactccggaggctgaggcacgagaatagcttgaactggggaaatcaatgccgcagtgagctgagatcacaccactgctttccaacctgggcaacagagcaagactgtctcaaaaaataaaaaaaagaaaagaaaatacataattgaattcacaaaacaaatttaattgctatgtatatgaagacagacaaatgcatggaaaaatattctgtgacgtattctttggttttataacaaaaaaggcaaacagacacttttactttaccttgttcttatcttaatataatacataggaccatatccacctctttatttcagaaagtatttgaacagtttctattctggaggattagagatttccttgaagccattactactctacaactttatactgtgatgggcagcaaagataatattgtgcctgatcacaaagaggagacacaagcctttccagaaatgtctacgctaaagacacacaccaaaaataaggagtttactaatctatattctcagcttgagtattttgtctgcttccacttctagacttaagataaggctacgttcctcaccctccttcctccagcacttgcttcatgcagttaaaatggaatgaatgactttagttaaagcgtcaaaagagtctcactaaggagatactaattatagctgttttcacgaagctctcagaaactccagcagggggctcattcattcctgctgagctgctacagaccctaagattatgttgtctacatcagccttagaaatttcccacaagcaacactcctcccacacccgccgaagtcatacaccagttacagtgggagggcaactgtgtaggtcactacaaagggaactgttagtttcatccccacattccccacaaacatttaaaataaaatcaaggcagggtgcagtgactcacttgtaatcccagcacttcgggaggctgaggcgggcagaccacttgagggcaggagtttgagaccagcctggccaacatggtgaaaccttgtctctactaaaaatacaaaaattagccaggtgtggtggcgcatgcctgtagtcccagctattcaggaggctgaggaggaaagatggcttgaacccaggaggcagaggttacagagagttgagatcgtgccactgcactccagcctgggcaacagagtgagactctgtctcaaaaataaaataaaataaaataaaataaaataaaataaaataaaataaaataaaataaaataaaataaaataaaaacaagtggggcaggtgaagctcccttaattcctccctaggaaattctataaaggcagagtacaatttagaaaatcaaactggggctctggctcacgcctgtaatcccagcacttcgggaggccgaagcaggtggataacctgaagtcaggagttcaagaccagcctgaccaacatggtgaaaccccgtctctactaaaaatacaaaattagctgggcatggtggcacatgcctgtaatcccagctactcaggaggctaaggcaggagaatcacttgaacttgggaagaggaggttgcagtgagccaaagatcatgcattgcactccagcctgggcaacaggagtgaaactctgtctcaaaaaaatttaaaataagaaaatcaaactggacatccaaatgataattaacttacatatgttcattcattaccattgctgttaccagaaaatgggtcttgtcccagaccccaagagtgggctcttagatctcactttcttgggaaagaattcagggcaagttgcagagtatagcgaagttaagatagtttgttagagactattacggagtagggcttcctcagaaagcaagaggaggaatgcccctactttaaactttttatttatttatttatttagatacaatatctccctctgtcacccaggctggagtacagtggcactatcatggcttactatagtctcaacctcccaggctccattgatccttccactttagcctcccaagcagctgagctagaggtacataccaccacgcctggctaatttttatatcttttgtaaagacagggttttttcatgttggccaggctggtcttcaactcctgagctgaagagatccatccatctcagcctcccaaagtgctgggattacaggcatgagccaccatgcctggccaagaatgcctcaccttaaacatagtgcttgcttatataggttgttaagaatagcatacttcattacaaagacttttgatcagcttgtgacgggctattagtattgttattttcctatgctactactgatttccacaagaatttatatgtgtactattatctttaaagcaaaacctattcttaaactaagaatgcattttgttcttgaaatattgggacgtttccataagttctgggtctttatttggtaagttagcatcattaactcatcccctcagccataaatatcttgtgaccaacagtaccaaccccctggaaatggggaatgctacccagcaggattggctttacccagcctttattcaagatggagtcactctggttaggacatctctgacactattaactttctatctcaatgtctttccttctctcactgcacaaccttagataattaatttgttaattatcaatctcataaatgaaacaaagctgatcagggcacatggctggtctggatgttcccaaggatgtattgcaggtggcaggaaggaccgtggacccagcgtccactttcccaggggtcgatcataaaacaatttgcaccatggtactgggggccagaagggcaaaagggagccatgtgatcaaaataatctttcctaggccaggcgcggtagctcacacctgtaatcccagcattttgggaggccaaggctggtggatcacttgaggccaggagttcaagaccagcctaacaaaaccctgtctctactaaaaatacaaaaattagccgggcgtgatggtgtgcacctgtaatcccagctacttgggaggctgtggcacgagaatcacttgaacctgggaggcggagtttgcagtgagccaagattgtgccactgcactccagcctgggcaacaaagtgaaactctgcctcaaaataataatagtaataataataatctttccaacaggtaaaatattttcaagctgaaggagtggaagtactggctagtcatatgtatagatcatcaaagaacaaggatgagcttctggaagcgaattctggcagctgggcttacctgctactccctgggagctttttgacgtccttattattattattatttaattttctgtcctgagtagctggggctacaggtgcttaccactacatctggcttttttttttttttttttagtacagacagggtctttcccaggctggtctcaaactcttgagctcaagtgatcctcccgcctcagcctctcaaagtgctgggattataggtgtgagccaccttgcctggctgagatttcatcaagctacttagaacatcgtgcaacttagaattcatgaattgtttatttctggaattttccatttaatatttttggaccttggttgaccgagggttactgaaacctcagaaagcaaaactgtggataagggaggattactatactgccattaagttgtattttaaaaataatttcaaaaattgtattcaagtaatatgtgtattcaattaaaatttcatcccttcaatgttttataagtaattcaaataccagagtggtaaccatcttctaagaatattagctacaatcccaatcactgtttttcaaaaagatgttgtcagtcctgcttctgaaatttctctccaacaggcctcctcctcccattcccactgccccaacccagccaggcccttaccttgcactgctccgggacaccagcctccaatctgagggtttcctggtgtctgggcttccatgcagctgtcagagtgttcttcctgaaaagaaactccatctgtgccattttccgagcaatacgttttactgggttgtcctgtagccttcaggataaagtacaaattcctgaacatgacacctcggatgaagtccgtcccctccttcccagattaccacctgcccctttgaccctgccctttggtcatcagccacaatcagctgctgtctccaccaagcctcaccagctctccaagccttcacccatgatgctgtctgcctggactgccctccctcccattcctctgcctacaagatccgatatgcgcttcagcctccaatgttagctcaccaaaatcttccctttgaattatgaatgcagctggctgcaaactcctccaagtgaccagagtgtcctataatcacgtctattatagcatctttgatttagggggtgatttttgttttttttgtttgtttgtttgtttttctttttctttctttcttttttttttttttttttttttttgcatttctgtatttcctaagagaatgtgaattcctagaatcctaggaattctcatctgatttttattcccaacgtctagcactatgcaaagcaaaaagtaggtacccaataactgcttttggaatgaataaatgaatcaatgaatggtaccatgcagctgccaaagtgctttctgcaaagcaactctgaccttgttgctctctgagctgtgctccttcctgggtgatgaggtaacactggaagctattaacagataagaaagagaaaaaaaaaaggaggggagagatctctgggtctctgacaaattacttattttcactgagtttctgtttcctcatttgtaaaacaaaagtgctgtccggatgagctctgaaggcatcttccagttctcaaattccagcctgcttggctcctgaacaactttcccagagtctctggcagctataacccaagtcttagcaccatctagtgataaacaggcacacagcggggagggaaagccggggagtggggagggcggataagagaaggaaatgccaactttaattatattatgagccggcaaggaattaggtcaaacctgcaaatacaaagttaaaccaagagacctaactttatcctggggatggaataaataattagcttcagaacatggatgaagtagacaattatagaatgcctgagacatggaaaaggcaataaaacaattcctgtgtaccctggccctcttgttcttttatcaatttactgcttgttactgtaattaaatatttttcttgggaggacatgtacttttgaagggcctatggcatgggactccaataactcaataaaaccacaaattaagtatttattaagaatatatatgtattttcaagtttcttccttactatttatttatttatttatttatttatttatctgagacagggtcttgctctgtggcccaggctggagtgcagtggcatgatcacggctcaccgcaacctcgaatccctgggctcaggcgattctcccacctcagcctcctgagt

SEQ ID NO: 307 - DNA, 582959 bp, Homo sapiens
  source 1..582959: mol_type = genomic DNA
ccctccatgctcttgtctctcacaaagatcatccttgtgacctcctatcccttgggctattctttgctgcattgggcattggacagtgctaagagggttgggcaccgtgcagcctagtgtttgcagctgccccggtgcgctctgctcagtccatattcttaccctgggtgtgccgagggacaggacaaagggcttattttatagaacatatttcttccccattcttctcgtttataattttggtttccaggaaagaatggaagaatgggcacctccaccctattagtgcacactctgtgtgtgtgtgtgtgtgtgtgtgtgtgtgtgtgtgtgtgtagcaggagcaaggggcagggtcagctgtgctgaggactaggaggtaaatggtctacgcatatccaaggtgggaagaccaagagaaataagagaagtaaatgaacagatcctctaaagtcatcttttccttattccagcacaccaaggcattgtgcatatggtcttggatccttattctctgttagccaatggaaaacatatatggaaagaaagcaagcaagcttgctgagattaacctagagagggcaggggccagcatcctgatgtctatgctaggccagcatggtaccagcagcagaatgtgggctgtggacatacacttaacatttctgatcagtttttactccctcaggcttaggggctacaaaggaagatagccaggtttctgggaaatttcgaagcacttggaaatatgatcgaagcagaaaattcctctgagtggaggagctgtgtaggctgtgtatagaatctgtggattgggaccatccaaggaatcagtgtctggaaagaagcacaaactggtgtgatgaaggttcccatgatgggtaagaactaccagggaaggttggagaagaaaggtttaaaactgacaaggaacctccaagccaccttagggacaatttgggttctttaaagttccatttgaatcccactccctcaacgagcactctaacttgcccctgtttatccaccccatctgccatgaccacatcaaacttacccacaagcgaggcccttcttagaacactatttgagttgtatattaaaatgttagggtgcctggtggtctagactctttccagcgggtcttgttctctgaacctctagaggagggaactttgccttcagaatattgctgagaggaagggtccagaatggcctggccagtatctagtgtgaccactctgcctctgagctatatttggctgagtcaggtggctggtgagtcccacacgtcctctggattgaatccacccacaggggagaggagtcagcctgtaggtttaattgccaccacaatcagagctatcaactgcctttattgtctaggaagattgaatcaaaggagggcagagaaccttgggttcccaacgcattctatgagctcttgggttcttcctgtggctttgtaggaacaaaagaacagaacaaacatgttggagtagtgtccctaacatttatttcaggtggtgactaggagggttgaggtgtagatatacttcctctcttctcgtggagccttactgaagacaggatcgccgttcttgtgtttatcagctgagaagggcagtctcgccatcttaaagacctgccctccagccccttcaaacgccacacttcccaggaagcactctctccataagtgttcagagaaccctgaccagagaagctcccgcacttcttatatgaactccgattgtgctgagggggaggggaggagtacacaaagcaggaggtgggtggggaggctggggtcacacagcccaggaggggcacacccggcgaggtgctccgtcagcacaggctccctcctccctccctccccccagtacaccaggctctgaccggaccggtcccaccgcagagttcagcggcatcaagtccaaggacagaactgcaagagtatggacacaaaacaccaaacaaattgggggtgggctcccggccagcctggtgagagagaggctcctttagccaaggccatttctggcttgtcagcctccagggtatgggctatgagcagcagtggggagccggggtttctggggcagctcagtgctgggaagacgtcatccccttctccccagggctgtatgggagcacaggcacaggggtaggtagagcttctggtcagcgaggggtagagcccacagagagaccagagagtggaccgcagtttcatgaaagcagagttatagctgccacttgtgcctgtgggcagagcaggtggtagaggggcctccaggaaagggccggggacacgggtgtccagcactaagcacagcgcactcagccgcagcctctgtctgtctccccacccgcccacctctggcacacagcacctggggacccagatttgtgcttgatcagagcttcgaaggaaggcagtggcagaggcgctgggaggctgtcctggaagtggccaattctggtgtcctctgcaaagtacccctcgtccctggacaaccagaacgtgccctgacctcttccctggcccgtccccacccgcggtgtgtgatccttagacgtgagtctgcatccgccgctgcaggggtcgactggggtcagagttctgggacgaggactgggagtggtgggaggaggaagcagaagccttgctggccttgtcgaactgcacatagccatcctgcttgccgctgctgctgacgctgctgtcacactgcgtgtccaggaaggagctgctgtcgctgagggagcctctctggaactcccgctcacaaagctcgatggacgagctgcccatgcccagcacaaaccgctgcccgtagtcgtagaggcggccctggccgctcagggtgctgtagatgttggtgaaggacatgcctgtgggcacacgctgcttgcccgcaggacgcaggtcgggctggcagctggagagggagatggtcggggttgagtggtgctctttgaaggtgttgacgctgtagtagccattggtggggtcctggatgggcgagaggaagaggagcgtcacctggtggagtctccactgagcgtggctggggtttccaggctgagcccgtccccttatgcggggagggaagagggaaaacaggaggaagggagcaacctggtagggagcaaactcaggggtgaacagctgcagggaaggtgcaggggaagaaggacactgaacaggagatggcagaagggggactgcggaccccaggaggggagggacggcaagggtgagggctgagggccgaaggagggaagcagaggctcttgactgggtttatgtcagggcaatgcagggtcatttgaaagtcaggctttttaattgtttttatccagaacatggatgcttcattttgaatctacatgtgaggaggctgtggaagagaactggggagtctcagccttagctctctcagcctcctcagcgttggggtagggagaggaggtgccttaggcagggacgggcacctgccaccaagctggcctctgaccttttcttctctgacttgctgtcatttgttgtatagatttggggtttgggccatcagagctaaagaccagattccatggctgtgtcttataacccggggcccttcttaccttcaggttctgaaactctttctcctcttctttgaggacctccagctgtttcaggactgagtcttgctggaattcaccccggtccatctgcaacccaaaaaaggctgctcagtagataggaggtggctaaacctccacttcccccaaggaaaagatgagatcagaaactcaaaagattgccctgtataacccccaccacccctcactgcctggaccatgtgaaagagtcaagatgagttcctggagccccatcctaggagacagggaagcagttgaggggggtgggtgagtaggtgaggtgaggggcagttaggggaggcgaggggcaggtatccgaggccatactttcctcgcttgggcgagggcatcaccagagatctcccatggctgattcaattccattgactgaacgtttattgtaaaatgccggccagttgctctgctaaggaccagagatccacagattaacgtacattaagatacagctctgctcatcagggagatggacttgtagataaataatttcagaatgtcagtcactgggcatggcaaggctccttagggcagtttcttttccagcgtgcaggcctagtgcaggccttagggagtcacaaggaataaccatctgtgagatgctggcgacatgggccacacctgttattctcatgaaaagttaacttccttagagatgccaaacagcctgagggcaaggatcacttcctgcttgtctctgggtcctcccacacctggttcagtgctttgcatgttgtggtcactgaccttgcctgcttttgggatggaatctcttaattatttgatttgccaatgcctagcacagtgcctgatatacaatagagctgcttcaaatggtatgtatatgttgaatgaataggcaaagtggcttagctctaaattactgaaaattaacaaaattattagacataagatgaaaaagcatactccacacacagtgggcatatgaattaatctgaataaccacagtgatgcttaacctgtgacacacgagaggcttgccatgtgtctctgctagttgcacggtataggtagtaggttccctcctactctctgggccgggatgtttcttctcccttgcaacctgctttcctcgtttctttttggagccctgtagaatcagccaaagtgcggccacccggctgcctcctcactaaggagaccatgcggttcatttttccagtaaatgctctggcactgtctggactggagaccttctttcccatcagattcaacttctaagtctgccccttcttgcagatggggctgtcttggggccaggaggtgaagggaatgcgagaatgacgatatcctcaaggggtggcttagcccagagccctcagcaagtcccttctgctcccacctgacactgagctgcccccactcttgcctgtggatttggactaagggatgtggagacagtctgaggcaaacagaatgtttgccgatgggagagaattcaaggtcccgtttgggatgaaggacacacatgattaagcttaagtatagagacgtcatcccttctcacatctaggctgtggtttcctccctcgtaaaactaaacactccactgtgttaattttaacagtgtcaggccctgtgttaggccccaggggaaatagatgagcgtagactcagaaacatgacctttgcccttgaggagctctgggataactggggaagctgacatggaattgggggaatgcactataaaggaggcacatacaaagtgttttgggagagcagaaggtgcacagctccgccaggggtggggaggacaagcccggaacatcttggagttgattgttatgggagaatgtgagattcaacagacaaaattagcaggcagagagaacagccggtgcacaggcctttgaagtccaaaagattcgaaggccaggaatcaagctctttggcatgtctggaaggccagatgtacttggccggaaaatggagctggagaggttggtggttgcctggcactgaggagccctgatggcacaccaggaagttgggctttgtccagcagatgtggggagccaccgagggattttaagtgggcaagtaacaggaccagatttgcattttagaaaggctgctttctcaaggctctcgagggtggattgagaaaagagacaaaagactacaaggctgagaccaactgggaggctgctgtaatcatccaggggagcaatgatgaggcctgaagtaaagaagtgatggtggaggacaggtggggcacacatttgagacactttttgaagtggaattgacaggacctgaaaatcaattggagagagaaagcgtagccgagggaaaagtcagtttgattcagtaaacgtctgtgagcctctaccagggcctgtgtaaggctccgaagaccccgggatgaacacagcagcagctgctcaccctctagcaacataaaccgctaatatttcttgagcacttattgtgttccatgggcttcaagcccttctgagttttgtccacttcaccctcaccacagccctgtatactgtggctttcagacccatctcatggatgaggacatggaggcaccagaaagcccatctactatattccttgctctgctgcctccactccaacatgttacgaccgaggcaaccagaaacttctagcatggttgtccaggtttctgcttggacaactaggtagatgatggcccataaatggggattcggaagaggaggagcaggcttgatgtgcctggagaagtgatgagttgactggcaatccagtccccaaggaggaacctgtgtttcttgcagactgttttggtggggtgcgggggatgagggagagggacatgtattgaatatctataatagctatgtgtgtgtgtgcgggggaggggaggggattatatgttatataacaacatattgtggcaatttatgcatatgtcttttctccttactgaagagccaggctctctgaagggtagactgcatttttgttgttgttgttgttttgagatggagtctcgctctcacccaggctggggtgcagtggcctgatctcagctcactgcaacctccacctcctgggttcaagcaattctcctgcctcagcttcccaagtagctgggattacaggcgcccgccaccacgcccagctaatttttgtatttttagtagagatgtagtttcaccatgttggccaggctggtctcgaactcctaatctcaagtgatccgcccaactcggtctcccaaagtgttgggattgcaagcgtgagccactgcacctggcctggactgcatcttagatgtctttgagtctgccagaacacaagcacagtacagcaggcacacactcacatttgttggctgagagtgtgtgcctcacctattgtggggtgggcagggggcatcttgaacgctgctctgctttttggaagcatctagttcattgagaagcctctagtcccaggaccttctgggaatggagtcacgggatgggatggggcgtaattgcattcttaccatcagctgcttgatggtggagtgctcctcaccctcccgaccagaggctggttccttgtggacaatttccactcggatatcatttttggctgacacaacacctttgagatctggagataaaatagtaaagtgtagatgatagatttagttcttacctttgagatgtcaagctcccttgcagtcccctgcccctgccctgccaccctctgcatttcccctccagcccctgaactcagcagcttcaccagccccccaccaatagaacctccatatggagatgctgtgggtgtttgggcctcagaggaggctgaccccatggccggcctgcctcctgtcacatgcccctcagccatgcacccttggcttgaaagatcgtcttcagccacttgtccgccttactgagctaggtccttttcatcctactgaattctcacttccttctagaagtcttctctgacctgctctaccaggcgggctccaatccctccattcatagaaccataaatctcagtgttggaaaggacctcaaagtgcccatggccaacccccatccaaagagaaacgcccctgaggcagtgggcagcttctctgtcgacgcctccgtgatggaagctttactgctacttctgcaggaggcaggctgtttctagttggagagctctgttagaaaattcttggctgggtgcggtggctcacgcctgtaatcccagcactttgggaggccgaggtgggcagatcacgaggtcaggagtttgacaccagcctggccaacatggtgaaaccccgtctctattaaaaatccaaaaattagctgggcgtggtggtgggtgcctgtaatgccagctactcgggaggctgagcatgagactcgcttgaatgaacccgggaggcagcggctgcggtaagccgagattgtgccactgcactccagcctgggcaacaggatgagactctgtctcaaaaaaaaaaaaggaaattcttgaggagctggtgcggtggctcacgcctgtaatcccagcacattgggaggccgaggaaggcggaccacttgaggccaggagttcgagaccagcctgggcaacatggtgaaatcctgtctctgcaaaaaattaaaaaaatagcaaggcatgatggcacacgcctgtaatcccagcgactcaggaggcttaggcacgagaatcgcttgaacctgggaggcggaggttgcagtgagctgagatcgtgtcactgcacttcagcctggccaaaagagagagaccctatataaaaaaaaaccgtatatatatgtgtatatatgcgtatgtgtatatatttgtatgcttccctataatttccactgagacggtggtgatggaggtcctgagaccacatcattgctggggtggtcttgagagccaaggctgcttagctcggagtgcagaaaatgcaaggggaacagctttcttcaaacatgtgcaggctgccgagtggcagaggagcagacccattctggtgattcattttttgcattacacttatataatgttagtgccagatggggccatcagagtcatatcctcattataaatgaggagacaggcctggaataactgtggctggcccagggtcatgtggcagaagaggtgggactggaacactgtgtctccattgtcttcacctgttctctgccatccaatctctcacacgttatctcctcggtgcacgcaattcttcaagcgtgcacaaacactagaattttattggtaatcactgaagacctttaaaagttttctcaaagcaattcctttattgcttccccacccactcccccacagctgtgtgagtgacctgcttttctggtgagactagcagctctttatttttattttgttgtagagatggggtctctctagactaacagctcttgtagagcaaggatcaaaccacaaaccgcttttccccctatctttctgtacagttcctgactgaaagagctatgtgttcaatccaaaatgctggctgccctgcagatgaagttcagtctagtccaggtcaacctcagcctagcgcccactctgccaggcgccatgttgcccaggctcacatacaccgatgcatcagacccactccctgccccaggagctcacagcactgttaggacccctgttcattgcactcctgcttacttgctctccggggcagcctaagcctggcctttttctctgtccccctccctgagatcccggatctccctcccgtacttctctgggaacgggcacagcagaacgccacgatggttgccataaggacgaggaaggccacaccagctcctacggccaccccaatgatgacggccatcggcacagactctgtgggagagaagcgggcacagctgatgacggatggggaatggcctactatccccccatgatctcaccccgttcctgcgggggcagcccctgccacatggggccctcctgggaaatgcctcagtggggcctgggcaggcacaggccgagtccaactggggtcagctctagctgggactgcaaagaccagggtggaggacacaggggcttggtgggtggaggagagggcaggggaactgaggtaaagggcagaggaaggagagcgaggcaggcagacacggagaagggagggccaggggacaggaagaccggagatgaggggtggggctggcacgatggagctctctctggcattaaacaggaatgctctatcacacagcggccagtgagtcataggccctggctttttttgaaaaatgactatggtcactgcccttgtttgttccgtatgttctctccttcccttccctttctcgggtgaatatagaggacatccggctcttagtgtttgcaggtctaagtagcttccccgcaggtctgctgggcatcagttgtggccctcaggtgtccaagtctcagggtccagggagcagggttacagcttctccactgccacctctctaaggagagaggcccctttccctccatctccaggtctgcagcttctccctcaaggctgcccctctgagcatccttgcacccctcctggcaagagaggcccacacactgggcaggcaagccctcacccctgctgagtctctgtggcctgtctcctgcccaagccgagtgggggtagggacagggagggtaaggatagagtcgggggtgatcttccacacagccttggcccttctacagctgcaagtggggtcggagcacatgatttagggccttgaggaatccatcaggaatagaactagagaatgctggggcagggagagcttggggctctcactgaggtccggagaagtcaagtgatttggccaaggacacacaggagctgcccagccagggtcaatccaggtctcctctcactgctcccacccctccactcaccccactcccaccccgtccagctccacccacagagtgacatgtgagatcccccacatctcatgtgctcggtaccgcccagactgctgctgctccgagtcctggctccatcccttctgctgagcaactgactttgcctctcttatatctgtaggatggggataatggtaccggcccctctgagggttgttatgggcttgagctgggtgaatgtgggcagaggccttggagcagagcctggcacccagccctgtttggtgtttgctgttgttgttacccaggaaggggtcaccagcagttcacggtcttttatttttgggatggagtctggctgtgacacccaggctggagggcagtggcacgatctcagttcactgcaacctccgcctcctgggttcaagcgattctcctgcctcagtctcccgaatagctgggattacaggcacatgccaccatgcctggctaatttttgtatttttagtagagatagggtttcaccatgttggccaggctggtctcaaactcctgacctcaggtgatccgcccgcctcagcctccgaaagtgctgggattacaggcgtgagccatcgttcccgatcagcagttcacagtcttaaaggccaggaaagttcctttgaaagactgagcccctccccagcctaccctgcgttcgtcagtgtgggcgagtggggacagctaggtatcagttctgggttgtaagcctcttgctgtctttttctttaaagggaggagaaagacctcaaaccctggcctctgaagatgctgctgggaggaggtatcaaggggtgggggtagggtggcagccatttgccctccggccagagggagctggcgcccctggctggcagtgttgctggttaagctggcacatccctttgccaccccaggacttgcacacgaagccattggttacctaccaattagtggccaggacagctgtaggggtgacagggaggggaccaagaggaggtggaatggtggacacttagggattgaaacgggaggtgctcgcattggttcaacagtcagactgagaaaaggggctgggcctcagcagagcttgccttgaccaatagacgacaacgtctctaggtttagttccatgaagaaagggaaactgctgtggcagctcattggttctctgcttttgaattggattgatttgggttggtttctcctcagattcctagtaagtttccttggaaaaacacagggcttgtctcagcggaactcagagccaaagcatgtccatggaaggctcttaacacctctgggcctcagtgccttgtctgcaccctggagagctgggcagcagcattgaaggtgccttccgatcctgggatccccagcccacgtttccacacgctgctgacggctgggggaggggtgccctcttagctggacaacggtcaccagggaggtgggcagggggagagcagggggtcctgtgggggcgagtgccccggggtgccatctcttcccagtccccagcctgcctgtgtgtgtttcctccttgcctggcttcctgaggtttggcctagggcgatgtgcaggcccctcctctctgcacagagccttccctgcatggctcctggagagggactggagggaggggctgtccccactcagcctcccctccatccaaggaggtgtgccaggcaccaggagccaccgaggggggaaggtgttggggagctctggatgagtgtcagcagacacaggagacacggagacaggagacaccaccctcagcactagcatggacccggggagaaggcagcgggaggctggcagctttctgggttgccccagtgtgggctgcaggggcctctgtgagcaacctgtgccctgggttggtgctctgataggggcatgtctgccaggaggggcagaggcaggggcatgaggatcccacgtggagcttgttgaggaggtaacagaggccaggggccagtgtggcaggaggcctgggatggaggaccactcaagtcttcagcatggccatagagcctggcttgctggtcctgattctcttttctggttttctgctcggggtggggttgagagcaactccgcccagggggcctgatgactgctttgctgcgtgtgcctggggagggaggcgctgccctgcagcctcagcttggggtgagatgacacttccatggggactgcaggagtagggaggggtggcaaacagcaagcatggattgcacaagccacagcaggggctgggggcccccggtgtcctgggaagcagtggccaagctggtgatgatgtggagaagcgggaagggtcggagagagcctggaagcagaaggcagtcaggacaggggccagctgaccccagaggccaggagtcagggctcctgaagagaaaggatggaaggaatggagcggggacgagcaagagccagtgtcccagagaggaaggagttgtgggttccggcggcaggcaggagacaggtctctggggtccctaggcccaagctggctgggacctcctctccccactgctttgtctacactaaaccctcaggacgggggagggcggagacactagcggccagcacaggcctccctaccccctgctgggttccctccccagctagccaggaagtcccttccccccttcccagggccattctcatcatctccttccgtacctgcttccagcccggctcccgacttcatttccgaacctgtttggaaataaagcaagcgtctacagccagggcctggctggccagggtggggtgggactgggaattagctgcttgagcggggctgggtgaggggctcctttcccagtcatgtctctgggaccccccaacagatccaggctagcccagctgaacttggagttcattcaggctgacttagagactctggaggggctagggaccggagagagatcacgtctcggaggggtctgggagggttggggtgagaacactcgggggagggcatggggatgggggcaccaaggggaagacacggagggtaggcaacaggggaccaggaaggtttgggatgatgtgtggatgatattatgcaaattatgtgcaaagcattatgcaaagcagcacctattagggaagaggtgttgggagatgctgtgtgatttgacccataggtgtgatcctggtgtggcccactgaggcctgggggcccagctgagaccacccacttggcctagaatctcttgctgggcctgacagcctgcgaatggacctttacctaagagggtgtcagagatcgtcaggactgaggcctcctgggcctcagaggcccaggcccagctgagcacgaatccctggtccaccatggcttagcccctgctggcaaaagggcaagatcaactgcccctctcagaacccggcttgctgctggctgtggtggggcttctggagccacccctccgtgcccctccaaggctccccatcctgttgtctgtgcctgagagctctgagcagacgctggagatctgagcctctttgaccaggagctgggacgtcagcgcacgggggcacagtggggtgaggcttgttcctcctgcctcctccctctcacccacccggctgctttgcccagcgctgcctttgaggtacaggggtccatgtgcctcctgggtctgcaggtcatctgagcccagcccccgaccctagggatctggacaagcaagcctaaccccttagctttagcctgggtgccctctgtgggacttgtgtctgagtaactggatgggcttgtcatcttaactgtgactgggccaggttcccagcacacccatgccagtgtatcccacgctccacccaggcatgacactttggtgtcagaccagggcccatggcagagggcagggcacagaagccagggcctctggaggctactgggcagcttgtcactgccaccagcctgctcactgttgtggtcacctcccactgaagcatcgccctcaagggctgcccctctgagctgtgttcttccctttcttggttcctggtggaggctcgtgccccttgcttcagcgagagcctggctgaggaggctgctggctggctaggctgtgtggtcagccaggaagagcactgtggcttgtccttgggccctggcccaccttgcagccacccgcgccctgacctaggtgaggagagggccctctggttccatcgttcgttgttccctcatggccctggcagctctcaccttgctccttgagccggatgatctcagtgtcggagccgaagctgttccaggccgtgcagttgtagatggtctggaagtcggcccgcacgatgttgctgatggtcagggtggagatgacgccctcctcggtgctgatggtctccaccgtatagcgccccgatgtgcccgactccagaacgttctccttccaggaccaggcctgcccgggggcgcagaatcaggaggagaccccaccagaggggcccaggacacgcccacaccagagtcacagtgccactgtcctgctcatgttcatgctcactgccacacactaacacatgtgcacacgggtatgtatgcaggcacacatgccacacaccacaaatatgcacacatgcaggtgcacacacaacacgcatcaccacacatgggcatgcacagcatcccacacggcacccacatgcaggtacacgtgtgcacacacaacacacaaacacatcacacgtctatacacagctccccacacatggccaacacgtttatatacatactacacacaccacaaatgtgtacacacagctctgcacacacacaagtgtgcacccactataacacacacatcaccacgtacacataccaatgtatatacacacaggtttgtacacacacaccacactacaaacatgcatatgcaagtacatgtaccacaacacacataaacatgcatcacaacacatgcacacaccaaagcacacaacacatcacagtgcacacatgcctgcacatatgtgcacatgtcacaacatgcatacacacatcacagtacatgcacatcacacttcacactaaaaacatgatacagacatgtacatacacatggcagacacgacaccacatctacacgcaacacacagccactccccgaaatacatgtacacatgcacacacacaccaagatgcacgcaccatatgccacaatacaacacacaatacaagcatgcttacacacatgtacataccacaacacacactgcaacacatacacacattcgccatacacaccatcatgtgtacttacaggtacacacactatgacatacacacacaccatgtgctcacacacacaagtacacacactaccaacagatacacatgttcacacatgccatgacacatgtacacggtaacacacccacaccacacatgtacacaatccacaaacacatgtacacacacatactctggggcatcctcagagggtctttccatcccagaaaggggcctggggagcatctttctgggcaaagtgggtgccctgttggcctgcgcactgcgcctccacacaaatgccccccgggactgtggctgcctgggtgggtgtgagttaggacagcagccccatgaacgcgtctacctgtgtgatgttgtatgtctgtgtgagaaatgtgtctacagagctgtgtttgcgatcaccttcgtctgccttagtttacagggctgctggttaacagttttcagagccggccacatacactgtctgcacctcatcgtgtaagcgcctcgtatatcctggttcggggctgatgagagggactgagtttctcaagcttgctgctattgtcacgctggactgacccattcctggccgtggggctctcccaggcattgcaggatgtcagcagcaccctggcctctacacacccggtgccaggagtatcctccaagtgatgacaaccaaaatgtctccaggcactgccaaatgtcccctggggccagtgagaaccgctggcctagaatcagatatttctggagagaaggtgtgaaaatgtccaagagtgaatggaatatttgacaatgagcatgtgttacatttataattaaaaacatcaaaaagcaaagtgaatggggaggcgtaggtattagttttattcatgagttcttgcaatttttttgtgaatctttcagacagtgaatgaactgaatgcttgagaaagcgtgtagcagcaataatactctaataatatcttagttaacaggatgacagtttcagttggtgcagcctgggtgtctcagcccccgcatgcacgggttaggggtgacctcagctgcttcacatctgggccagccccaccctccctgcacaactgccctgcccactccacccctggacagtcttctagcaggattttgccatacactgggaattactacaaataagttttccccgagtagtgctataaaatgctcacttttctttgttttcatgcctgagatccctccagttttagatggatttgagtacaagactctgcccctggatcacctgaggtcaggagtttgagaccagcttggccaacatggtgaaaccttatctactaaaaatacaaaaaaattagctgggtgtggtggcaggtgcctgtaatcccagttacttggaaggttgaggcaggagaattgcttgaacccaggaagtggaggttgcagtgagccaagattgcaccattgcacccagcctgggtgatagagagagactctgtctcaaaaaagaaagagggaaaaaaagactctgccctcaccttaatttttttgttgttgttgtagagacagggtctcactatgttgcccaggctggtctcaaactcctgggctcagtcgatcttcccacctcagccttccaaagtgctgggattacagacatgaggctcctgctcagtaagaccctccctttaaaaaaatgcagatactggctgggcatggtggctcacgcctgtaatcccagcactttgggaggctggggtaggaggatcgattgagcccaggagtttgagaccagcctgaccaacatggtgagaccccatctctactgaaaatacaaaaattagcgaggtgtggtggcagatgcctgtaatcccagctactcaagaggcgctgaggcatgagaattgcttgaactgggaggtggaggttgcagtgagccgagattgtgtcactgcactccagcctgggtgatagagcgagactccatctcaaaaaacaaacacaaacaaacaaacccaaaaaacacacaaacaaaaaaaccaagcagatagctggtaggaggcgctgagggtggactcctcagttgccttagctgcattgcagggataagttctttgaggaagggagagagaatggaatggtcactttagaggggacgattgataggcaacagggcaggctaccatggacagtaaaggccacagagacctggcaaggagggctccaggaggcacagaaaggggttgccaactattacctgcgctctaagattttgctaaagactggcctggagcccaggaagagaagaagtcacttgtcttttctctccactaccctcgtgtgcccctctgcccttaggatgcggaatttggtcagagccgttcatgtcagagctcagcagaatggcagctgaaccctgggagagcactgcctgttctgagaaaggcctgcaattgtgtcttcacgatgcttttccaagacagccaaggcaggtataattttcctcagcaagaaagaggaacctcggaggtgtgcaccgcctggctggccacccaggtattggcaaaagtgactgttgggctgctggcccggcccccgcccgccgtccctggagcactcacgatgcggtccggcggcggcgtgctccggatgaagcacttgatctggcccttctcgccgtggagggcgtgctgggtctgggtgctggagatgatggggggtcctgttgagaaacagcgtcccattaggcacccgggaagggcacgtccctgctggcgccctcttgggtgggttcagaagtgtattcattaatccaagcattcagcaaacatttgccgaaggcctgtatgtgcaaggtaaagtgcaaggtagaggactcagagataaattaggcattcagtcataaacctctcaagggatcatgagcgaatgcttctaagtcagaacccccagaagatacaaataactgtaataaaaggtggtgagtgttagtaccacaggagcggtgcagataaagtgctaaccgacttcagaggagagagaataattctatctggcggacggggaaagctttagggaggaggtggtaagcctgcagagggggtggggaggtgtctagatgaaggaagactcccccgcctcagccagcggcacccctgcgagccattcctcagatatccagtagagggcgcccttgcctaacaaatgggagctgctcggccagacgggccaacgggaagaaatggttgctgtccctctccttagggcgggaatcaccccggacagggggaatgcatgcgctggccgtgttcacagccctcctcccacctgtgtctcaggaggtcctgcagttcatcatcttgtctgcctccacgtccatacccagactgcccaagtgaggccatggctcccaaactgaccccaatattatcatatcacagagtgtggcacatgtttatgggtgtcaggttctgagagcgcctgtctcattcaccacattgcacagccaagagagttcacctggtggaggggagcctgttccccagcgcctcctgtccagttccgcctgttacctaacccaagtctttcccctgtgacgcctgcctggccgtgaaagacaaaagaaggagcagctagcttagcctgggctctgctggcttcctggctgggctgggtggttgaaggatgggagtagggacggaaactgtcatgctccctttccaatccctggggtcacagttgggacttagatggcagataccagaggaaagacagccgggagcaacgcatctggagaacacacagaattatgcaggaacaaaacaaaaattgctgcaaacataattgctgtttattagccaccttaattaaagcagatttgcatttctatgagtagctctcagccaagggagaaaaggtactgtagacactccagtgacttctgttgagtttgagaaggcaaaagggctcggggcagcgtgaggtgggcgtgggggaccctccatggctttaagaatgggctgagcgctgccctccttcctaaaaatccttcagctccaacaggtctaggacccaaagagatgaggagattgatgttttaggaaccggatggtgctttgttttattgctggactaaaacgtgatgataatataaaaccttttctggtcaggtgcggtggctcacacctagaaacctagcactttgggaggctgaggagggtggatcacaaggtcaggagttcaagaccagcctggccaatatggtgaaaccccgtctgtactaaaaatacaaaaatttttagtatttattatttagcctccctacttgggaggctgaggcaggagaattgcttgaacctgggaggtggaggttgcagtgagccgagattgcgccactgcactccagcctgggcgacagagcgagactccagctcaaaaaaaaaaaacaaaaaaaaaacaaaaaacccaacatgcacagacacacaaaacacacacacacacacacacacacacacacacacacacacaaaaccttttccttgtgcttcccaggagctaggaattccctgaggggttttcatgattctaaaagccatcatcaaatgcatctgcttcttaaaagaaaatgaaaaccaggataaagggaaatggggtgagggttagtaagatttctctccccttcctgcagatacctgatttgagccaaatcggttgaggtgtgtgccaatttctttcccaaaggactgctgcgctggccagcagttgtccaaggctgggatttgtcgcgataaaaacctgatctcatttgaatgctttcatatcaccagctccctccagcccatgcccaggtcccatccactgggcgtcccccctccctctgcctgctctgcagaagcaggggcagacagttcgccccctggcaggtctggtgcgctcccctccggggccactgaactcatccacctgcctccaggtgtgtgaggccaccctagtcaagaaataaacaagcagcttctttgcttccctccaatccctccagcttttctctgcctggaagcctcggggagcttgtgctggcaggggtggaggcagaggaggggagagaaagagacctggagagtgcagattcaaccttggtcagcgccagggcccgggtttcagtgccctccccgtccaagagaaatgtccctcccggcctgtgttccccagggggcattctctcctcaagaaatctctttaaatctcccttggaaatgtctgaacgtctaaagtgacagcagatgtcagctcctcctttatccacctgcttttccccagaaacgccaatgctcatttgatgctccaggcttgggggccctggagtgcatgagtgagtgtgagggtcccgggctggctggtcatagggccagcagagcagagccggctgcaggcacagacagcctgacttccgagtgccctggctggcgcgggctgtgtggagggccgctgatttcactggggcctggagctctgagccgagtgtcagacacctgcgctgaaaggaaaaggctgcagcctgtgttgccatggatatacggaggcgcgatcagatgctgttatttttagccctgcagtgccaatttattggtggcatcctggggacactcaggaaaggcaggagggctccgactcagggctctgccaggacaggtggctgtgaacgtgctggggtctgggtagactcagcctcccttgggggctgccacgactctggggtggggggagaggaatggaaatgcggggcagtgtggggggagctggtgaatggagacagtagagaggtatggctgaggagacaccaagctggttttggttttctagcgaaggggagaatagatgaggccatcagcaggtggctttctgggtagagaggaagctgaagcccacgagctaatttggagacctcaggagggccctgctctggggccaggacccagatgtcctgcaaatgttggtggttcagttcctgcagggtcccagagctttggggttttgatctgagtcaggctatggtgggaacaggggcctcccaaagggcagtgggcatgacagaggtgaggggggagcattcggaaacggcagaggaatcgaactggcagctttgctttttgcctgtggccaaagcaccagatagggcagggacgtccgcatttgcgtcctggtgccacaaccttcttgggtctggcctgagccaggtctcagcttctccatgactgtctacaccccatcattcaggcctggtgtgatgcccttgtccctacatatttcatgtaacagtcattcatctactaactcccaccgtgaaaatactcccctgctgcaattatttttattatatataataagacatgccccctgccctcaagggggcccctgaacacgtggcctcgtggagacggtgacagggctccctggctgggtgactcacacgcattgggaagaggctgatcaggagctgcagagatgctctcttaaattctcatggggccaggagaggtggctcacgcctataatcccagcactttgggaggccgaggcaggtggctcacttgaggttaggagttggagaccaacaatggtgaaaccctgtctctactaaaaatacaaaaattagctgggcgtagtggcacgtgcctgtagtcccagctactcaggaaggtgaggttgcagtgagctgagatcgtgccactgcattccagtctggacaacagagcgagactccatctcaaaaagcaaaaaaccaacaaaaaattctcacgggccaaggccatggtgagtggatgaaagggtggacacgttggccacctagtgacctctgatgctttttttcctggccaggataaaattcatcacccaccactctcagggctgagaccccttcaaagctaacaaacaaaaagagaggtgactagaaaactacccaggcccttcctccctcagcctgggtctgacggggaatccaggaggtggacctaattgttgtctacccatagttggaggtgacagcaaggcccagagccagcgacagctcctttggggctatgcctggtgccaagatgcctgaggtccttcttccctccctcaggcctggctcaccccagcgagggtcttaccattgacggtcagggtcacctctctctccccggctcccacacggggcaccacagcccggcacacgtacttgcccgcgtcctcctggcgcacggatttgagggtcagggtcttctcattgctcaggacctaggagaattggcaggctcagatgccaagagcaggcggaggggtgcactcttgtctctgggaacaaggcagctgagaggctggcctggggtaactgaggcagtctccggcatctcagtaggaagcaaggtggggaggaaagaggccaaaagtttcctggcccagacaatgcctgtgggctgtacagaggagactgtaccagcagagaggccaccccgtgtgactgaggatgttacatcccaggcgcagccctgtgggctgggggcatgtgggggcacatgtgccggaggagggggatgcctgcctggggacttccaggtttcctcctacaggaacctccctgtacctgcggtggcttctcctctcccaggctagccatgggtgacatgatcctacagctgaacttctctgggggctcctggacctgttttcagagtcattttcaggatccctttgggatatagcttggagtgatgaaaacaggctctggcatgagcttggtctgcgttcgaatcccggctccagcagtgaacacctgtgtctctttggtcagttacttatcttctcagacgctccctttctatgtatggaggctgctaggataatgcagcgtctgctacataacaggccacacaaaggtcggtttccttctggtccccctgcttccctacctggagctctccctgttccttcctatgtgaggacatctgacaatctcttatgcactgaagaatatatacgtcttaaaagaggaacacaagggctggacacggtggctcacgcctgtaatcccagcactttgggaggccgaggtgggcggatcacctgaggttgggagtttgagactagtgtgaccaacatggagaaaccctgtctctactaaaaatacaaaattagctgggcgtggtggcccatacccatagtcccagctactcaggaggctgaggcaggagaattacttgaacccgggaggcggagtttgtggtaagccaagatcacgccgctgcactccagcctgggcaacaagcgcaaaactccatctcaaaaaaaaaaaaaaaaaaaaaatggaacacaggaaagtgaagcccaagtccaaggctaacggtggctttatttgggggaagtttaaaaggctctttctttctctttcttttctttctctctctttcttttctttctcctttctttctttctttctctctctctcttcctttcttcctttctttctttcctttcttcttcttttttttccccaaggtcttgctacgttgcccaggctggacttaaactcttgagctcatgtgatccttccacctcagcctcctgagtagctgggactacaggtgtgtgccactgtgcccacttgaaaagcctttctagtgccttccctcccagcacattggtgaccacctacttttcttgtaaggtttaggacagggcaagagtgcaatggctgaatgtgctcagggtgggacaggcacatgggggtgcctgggttccccctcctctttctgggatctttctccctgtggcttacactggaggctgactcccccagtctaatagtgagaggggcctgggcagcagttccttcttgctccactgtccccgccccctgccagaggtgccccgaggtctgagctgcagcctcaccactccggagccccgcttcatccagacgatggtcagggatgggttgccggtccaggcgcagctgaagatggcatcagagcccagatccacgagcaaggattggggttctgtggtcatccggggcccaactgcgatgtgaggaagaagaagacaggttcaggtgggtggggagctctgggatcctccttgctgctgcctccttttccccctagaccttgactggggggaggcaggcagtggggtacttgtgccacctcagtcgcttccattttaagtcttatgtccgggcggggtctgggatctgggagtgggactcaggaagcaaggaggagaccactctccctgaggcttcgcctctcttgggcccatggaggtggtcggcagcgtggggcctgggaagaaggtgctggggaccaggttctgcctggatttacccccacggctctcatccccttccctctgtctggatcacgcccggtgctagaaagctgcggaagcccctccatcccagtggcgggcaggggccctcctcctgccctggaaatctgggctcttgggatcttcatgcctctgccttcaagctagctgccatctcctccagcctcagccttcatgacctggaatcgagtgactggtgcacctctggggtgggatgggggctctgagatgcagggtgatggaggcagggctctcgtgacccacgcctcctcccccagggtttcccacccggtgctctcaggccaccctcctattacagccgttccagcctctgtgtcacgcccattgcagtggagcagccctgggttccacttccgacccctctcctaagcattaaagagctgaatgcaggctcctctccaccttccctagcatgtctggagccttctgtagaccaagcttggtctacacagtgggggccgtgtggggattccaggctcagggtccgaccgtggccaggcaggcctcagagtgctccttccagggagcagacagagcctgaagcctggtgccaggagactgcgattagtcccctgatgtaaaaagggagtaacagcactttcttcggaggcttcaagggcaagggggagggccagattttttcaagtttgtaaaagcaagtttaaaactgtaaggggcggtgcatgagctaaggatgcttgttttgaacacatccagccagctagtccatggcagtgcgctgccttgctgcgggtccctgctggacctccagtgaataagaggggatgggcaggtgcggtggctcatgcctgtaatcccagcactttgggaggcagaggtgggtagatcacgaggtcaggagattgagaccatcctggccaacatggtgaaactgtctctactaaaaatacaaaaattatctgggtatggtggcaagtgcctgtagtcccagctactcgggaggctgaggcaggagaatctcttgaaccagggagttggaggttgcagtgagcagagatcttgccactgcattccagcctggtggcagagtgagactgtctcaaaaaaaaaaaaaaaaaaaaaagaaataaaaagaaaaagaaggtacgtccgtgagtcccctcagtggaaggcagcagaatgtgtgaatgggcaatggatttggtcattgcctgggttcagttctcatttggccacctactgtgtgacctcagacctccatctcctcattcagatgatgagaataaatatctacccatgatggcctgcgtgcttgtgtcccccgtcaaccctgcaattcgtaaattgaaatcctcacccctgtgggatggtagtaggaggaggagctttgcaggggcaggggttagatcatgagagtggagccctcgtgatgagattagtgcccttggaataaaggccccaagagcttgcttctctctttctctctgccatgggatgccacagcaagaaggcagctgcctgcaagccaggaagagagtccccaccaaaacccaccacgatggcaccctgatttcagccatttaagccaccgagtctatggtaacgtgtcatagcagccccagccaagaccctgactcatggggtcatgatagggattgaaataaacatgaaacaatgcacaaaccagctttcgtcgagtgcaaaccatcctacgctcatgacgcatgaagcttgtgttgtgtgcaatgaatctagccctggtttctccagctctaagcagaaaccagtggatgcctgctcgcctggggaagcctgcaccactgcactcacagtagacgtcaaccgtgcggctgaggttggtgctgcccagggcgttggtcacctcacaggagacgggctctgagaagtacgtgtagtccactgtggtcctgtacacctctccagatgcctccttgatgatctggccccgcttggcccacctgcaacaaaggccaggggctgatgtgggccttgagtggcaaggccaaccctccgggagctggacacatccatcccatggaaaaatgaggcctgggttgtgtggcaagtggggagtcctctggggtccgtcaaggggaatcttcacagaggggctacttcaagggctcagaaagagttggttttgctcccacccaggtggttgtgaaggcagtgggctttggtttgtggtcaccaggcagtcagtggcactcaacaagtgggttattctggagggggtgagttgattactcggctggtcagcccatctgctggctagacgatggaaaatccaactgtcagtgggcagacagctcgctgtcctgctctgagctggatcatgggcccctttggaaaagaaggaggccaagtccatgacctcagaggccagggtcaaacggagcatgcccatacatgcatgctcatacgtgtgcacgagcacacacacacacactgacaaggcgagaagctgtaggagaggtatgctgtaggggctccatctcccgtccaaacagtggaatactaatacccatcaggaggagtggcgtgagcgagtagccctggctgcccctctctttcctcttgacaagctctcagctctcctgtcctgttctgcctcctgcttccatggggttctgcatggtgtctcctcgccccagaaagtcctcctagtttccctggatggcacttgctcttcttcctgcctggcctctgcccttgcagcctggctttgctcctctgaagcaatggctccatcagcactggcttggtgaggggatgtgagtcggaagtctcttttgtcggccaatcggtaccacacaataggggaggacaggaggcctctggcttgctttggatctggctctggggcagtgacccctgtgttggaccagtgacccagcagcctgctgtgtgcagaaagcaacggagcctcacaggggtgtatgtgtatacacatgtatgtgggtgtatgtgtatacacatgtatgtgtgtgcatgtgtgttcatgtgaatgtgtgcatgtatgtgtgcacgtgtgcatatgaatatgcatgtgtgagtgtgcctgtgtgtgcatgtgtgagcatgtgcgtgtgtgcatgtgtgagtgtgcccatgtgcacgtgtgcatgtgtgagcgtgggcatgtgtgtccatgtgcatgtgtgcatgtgtgagtgtgcatgtgtgagtgtgggtatgtgtgagtgtgtgcatgtgtgagtgggcatgtatgtgtccatgtgtatgtgcgcatctgtgagtgtgtgaatgtgtgcatgtgtgtgggtgtgagtgtgtgcatgtgtgcatgtgtgtgtgtgcatctgcgtatgtgtgcatgtgtgtcaatgtgcatgtgtgcatgtgcgtgtgcatgtgtgcatgtgcatgtgtgcatgtgtgtgtccatcggcgtgtgcgagcatgtgcatgtgggagcatgtgcacgtgtgtgtgcatgagtgtgtgtgtgtccatgtgcatggtgcgtgtgtggtgcgtgcatgtgcgagtttgtgcatgtgtgaatgtgggcatgtgtgagtgtgggcatgtatgactgtgtgcatgtgtgagggtgtgcatctgtgcatgtgtgtgtctgcatgtgaaagtgtgggcatatgtgtgtatgcgtgtatagatgtgtgagcatgtgcacgtgtgtgtgcatgtgtgcatgtgtgcatgtgcgtgtgtgcatgtgcgtgtgtgtccacgtgcatgtgtgcatgtgtgtgggcgtgtgtgcatgtgtgagcgtgtgcatgcatgggtgtgtgcatgtgtcaatgtgcatgtgtgcacgtgagtgcatgtgtccatgtgcatgtgtacatgtgtgagcatgtgcatgtgtgcatgcatgtgcatgtgtgtgcgtgtgtgcatatgtgtccatgtgcatgtgtgcatgtgtgtgtgtgcatgtgcatgtgtgtgcatgtgtaaatgtgggcacgtgtgaatgtgtacatgtgtgaatgtggccgtgtgtgtgcatgtgtgtgcatgtgtgggtgtgtgtatgcatgtgtacatgtgtgagcatgtgtgcattgcttgtgtgtccgtgtgcatgtgtgcgtgtgtgcatgtgtgcatgtgtgtgcatgtggttgtgtgcattagtgagtgtgtgcatgtgtgtgcgtatgtgagtgtgactatgtgtgagcgtgtgcatgtgtgaacgtgtgcatgtgtgcatgtgtgtgcatgtgtgagcgtgtgcatgtgtgtgtccaagtgcatgcgcatgtgtgggcatgtgcatgtgtgtgtgcgcatgtgtgtgcatgtgtgagtgtgtccatttgtgagtgggtgcatgtgtgagagtgtgcatgtgtgcatgtgtgtgatcatgtgcatgtgtgtgtgcgtgtgtgtacatgtgtgagcatgtgcatgtgtgcatgtgtgtccatgtgcatgtgtgcatgtatgggcgtgtgcatgtgtgagtgtgtgcatatgtgcgtgtgtgtgcacgtgtgagtgtgtgcatgtgtgagcacgtgcatatgcatgtgaagttgggggcttccttacggatctccagggagagagagttctccgtttcccctggtttaatcctactctgatcccaacattcttttttttgaaaccacggaacttctcttcaggctgttacagttgaagtgtctatggggagtttgtctttccagagctgcagaggcttgttgcctccagaagcgtcaccccacagccactgctccctggaactgcagtgtctctgctcccctgctttgcctcccctttatcttattcctggagcctttcctggcaccacaaacgccgtctcctgcccttccctccattagcttcttgcctccgtctgacccatccagccccgagagacgactgtttcttggcatcagacagaacacctaggctggcaccaagcagttgttattgcaaattaatattgggtaattattaagaacacaattaataataacaactgtagtttaacaacagagcaaaccatatctcccttagagcttaaggagcttcccaacaaaccattatgagttattcatgtgtcgtttcaatctcttaactttgatttaatgaccagacttaaaagagtcaggccggcccctgcctgcggcaaatgaattcagttccaggcacagctagggaagtgtgtccagccccgcagttcctttcaccctgctgaggcgagggggccaggtggtggatgcagcgtgaggccaagcgggcagctggctgggctgggaaggcagggagccctggctgctcacagctgtgggtgccgggctggggctggagggtttgggcccaggtgatagggccaagcatgcgtcttcctcagggcttcctggagaagctctcgcctctcctctccttccagggcccctcaccaggagcatcacggagggtggaagccccacctgcttggccccaagtaatcagcagaactgctgctggctccgggagccaaggttccctgccctccctgtcctctcctctcatggtgagggagccagagacggaagaggaccggagccgctgtcggggctgggtccgcaggagcccaagccaggtcttttggggaggtgcctcaggacccgacagagcccgcagctcacatctcgcccagccggtctttcttcccctcctgcactgaaaaaccctctgagaggtccctgccaaaagcacagacactcaaaccactgcatccacgcagctggccaaggatccaggccaagagctaaagagtgagtctcgccccaccctcttcgtgcctctcctgattttggtgcagtttcttccctgtccttcctctttgtctcctcccctctccccacccacctcccccaactcactgttgcttccccacctcccccagcccctctgaaagtggagtcagcttaagcctctcccaatcaatgtctaatttggtctgaacaaatgtaagaggattaattatttatatcacagaatcaggggggctggcgtgtcacagccgccaggttgtcctcaaatagaccaaggtttcatctcgtgtgggggggccacatcccgctatctgctggggaacactgagagactctcagaggaaagggccccaaagcactttgggctcctggtccctaggagcatctgcagtgacatccccatgccacccaggcctcctttccaggcactgggatggaggagggcgttatctctagcttcagagatgacagcctcttagtgacagcagggaggaagctatcaagatgaatgaaagtaaagaaacaaagtttcctgtaatcttgtcagttaggaaaaatcaatgtacttatgtgatgagatttgcttacggcttttcttcttggatcccaacattgcttctaaacacctggctgcttggtgagaccttgctggagtgaaggggctgagcgagtgtgggtgggtgcaggcgcccaccacctcccctctccgtggcccctccgcctcctcccttcccaggccactctggctctctggcattaacctgggggccggaggggctccctgaaagcctctggagtcctggagggagatgacccctcagtgaggtgttttcagggcccttcactaatcagaaggccatgagggaaggtgaccaggaagaactagtgagtctctgcagggcaccctgccctccctgcccctcccagctcctgcttggtataggaggggccggctgtgatactgtgagctccaggggagtacgaaagggaggacccacaggccacctgtagcatggggaagcccgcatgttctctgcttgttcattaacttttcagcttgcaaaaaacaaacttcggaattacagaaaagttgtaagaatagtcccattaactgccaccctcccatcgcccggattcaccagctgttaacattttctcacgcgtgctttgcggagacctctcctctcctcccaccttcttctctttcctattattgctgttctgcttttttgaggttggtgaccctgggaatcaggcccagcacttcgtttcctgggtgtttgctgtccgggtcagtaggcaggtgtgggtgggggaggcaggcctgggggtggaggggtcaggtcccagggcgtgcagccctgctgtctgcccagcctacccatcactaggaccccaggtgaccagagcctggcagtgaggagaaacgaaagtcgaaagttgtgtgtcctggtctctggggcgcccaacaggcattctaagggtggctgtgagggtgaataggggtgcttgccgggtggtctgtgggtgtgaagggctgccctgggaagctagcatgacagatattttctgggcatgttgtacctggtgtttagggaccaggagcagagacctgggagcagacagaggagagaagctgaacttgtatggagaaacccaggcctggcaggtgcagcgtggaagcctagggccagggagtctcattgggcgcctctcttgtatcttcagtggcttctgaatagatgccagaccacagccaaaccagacttgccccctggacctggctggacccacatgattctggggagcctggagtccccggctcagaagggaccctggaggtcatctgttctttcttctgactctagtcaagcaaatggttaaactggacaggacaaatgggtttcatcctatttaaaaatatccttggggataggaactctgggctctgcctgggtttctgactccagtgctgcttaattacgcactctgcagggagcacctcctcatgtccaacctgaatccctggctgtccctgtggcccatttccttccattctgcccacgggggccacactggctcttgtcttccctgttctccattcccacaggccggcttatttcctaggctggcaccattaacatccttggcctttgcagatgctgcagcttaatggccgagatcaatggcagaggtgacacctgggctccaccactaagcctggtctggtggaaagagaccaggctgagtcagggccatggcaagttccacgtggcacccaaaaggaggtgagtctgcccttgagtgcctccaaggtcacttagtctcctagagtcttgtgcagtgacagtgcccaggcagaaaggcgcccagaggaagcgtgtgtttattggatcagtcagacacatctaaggagcatgtggtttatgccatgtgctgtgctgcatgctgagagccatcagtgactaaattgcagttcctgccttcaagaagctctgtcacaaggcagaaacaagtaaaacaaaaacagtgatgctttggccgggtgcggtggctcatgcctgtaatcccagcactttgggaggctgaggcaggtggatcacgaggtcaggagatcgagaccatcctggctaacacggtgaaacgctgtctctactaaaaatacaaaaaaaaaaaaaaattagctggcgtggtggcgggcgcctgtagtcccagctacttgggaggctgaggcgggagaatggcgtgaacccaggaggcagagcttgccagtgagctgagatcacgccactgcactccagcctgggtgacagagcgagactctgtctcaaaacaaacaaagaaacaaacaaacaaacaaaccaacaaaccaaacagtggtgcttttatccgtgttgtgagcaagagacacacaggggccatgagtaagtgtgatcccggatgctcactggactgggccggggcccagacatcctgatctacccaggtgaaccagtttgatgggcacaagactagaatggaggttctgatcttgctgcttctcctggttgttctggtttttttttgttttcgttttttttttttttttttcctgagccttttccccatgtttggagtgtggaataatcaggctattcaagcagaagccgtgagtcctgcttcctccagtggaagagggcgcgtgcacgcacagaggagaggaagggtccacacggctagcaggcaggcgggtttaagaggaagggaagaaggctactggacacgcggtgtggactaggcacacactgcagccatgctgaggaccctaagtgacatcccacgtgagaggcacgggggtgggggccagtggccaggccgggccccctcagcagtgactctcacctgtactgggtgacagctgggttggcctttgcagagcagtggaaagtgacgacgttgtcctccagcactggctgtggctccaccgagaggttgaccagtggagggtctgcagggagaggagagtcacttgtagaccggagaaagaatgggggcagggagatcctgggcgacatggaggatacagccagagactccaccacccagggaccctcagagcagcccccgccctggtggtcttcaggaagctgggggctccatgggaggtgcctgcttcagacagtcctggaggtgggaacagggcctccccgtggacttggggcctggtgtggacacgaaccccgagccaggaagcctcaggcttgggcccaggggtttcccatcctccaacttttgggcggaacaaaataatctaggaaggagaggtgggaagaggggtgcagggcagagaggggcgcgtggacactcagtctcgcttcagtgcagactgtctttgaaatgtctgtttattatctcttttccgtaaaggttctggggcatttgttaacttgaaagcggcatttacaccctttcatcagcctaatcatctccactcagtcctggctggtggcgcacggcctcagcttcccaggccggggctcgcttcctcatttgacgtgataagaagccaggctctgaagtgctaaatggtgggaaggggaggagacagaaagtcagggagagaaagaggcagggagacaagaaccagagacacacagagacacacagaagggaccggaggccgacagcgagacatgtacatagaggagagacatggagaccatagaggaagagagattatgtgtgtgtgtgtgtgtgtgtgtgtatgtgtatgtgtgtgtatgcatgtgtatatgtatgtgtgtgtatgtgtgtatgcatgtgtgtgtatgcatatgtgtatgtgtgtatgcgtgtgtatgtctctgtgtgtatgcatgtgtatgtgtatatgtgtgtgtgtatgtatgtctctgtgtgtatgcgtgtatgtgtgtatgcgtgtgtgtgtatgtgtgtatgcacgtgtgtatgtgtgtctatgcgtgtgtgtatgtgtatgtgtgtgtatacatgtgtatatgtgtgtatgcttatatgtatgtatgtatgcgtgtgtgtatgtgtgtgtgtatgtgtgtgtagagcgagagagagagagacaaagatgaggaagtgacagggacagggagagacatgggcagagagacagaaagacacacacatagaaattgagaagtgcagaaaaagggcgagaaaaagagaaatctagagaagcagagggcagagtgatggagagatggagagactgacctgtttgcagagactgtgaatcagacaagaatttcagaccaaaagcagaaaaggccacggagacccggcacatagggcccgacaatgacagggtgttagagagaaagaccaagtcaaacaacgaggaaaagagatatgaaggaggagcagacgctgcaagatggaaagatggaaacagctcgagggggctgcagcagagagacagagaggtgggaagggcttccatcagcctggccctgcccagctcaggggcagctggctctggatcctctccagaggctggtgtcacccctgctgctgggctcctggtggcccccaggcctcggcacccccggggcatccacacgccgagggatgggggataacgagccagttcccatcctttttccctgtcatggcccagagctctggctgagttgagtgggcagcccaggacctcatccccatggacaggctgggccctgggctgcatcttctgggtcagtccccaccaacaagcagagcaaattgctggaaagtcacgaggacttctaggggtccagcccatttccagaaaaagaagtaaagaaaccagtttctcagaggcaatgaggaaaaatgctggtctctttcggtccccatgggggcaccacaaagggagcaaggccccagctggcccagttggtctgggctctggttgggactacggtggggtcctgagaccctcagagagtcatacagtcatgcactcagcctctaagctgcagaccgagccggccttactctggagttcggatcacataactgctcagctgccctcttcctgctggtgcccaagaggaccctgcctccctgcctagtgccaggcacgggagctggcctgagagatggccccagggctgtgctggtgtctgcaggcactggggagagaactctgttttctgagtagcaggtggctgactgtgctggggagcctgttctcccacattttccctagttccagacgggggaccacaaatccaggaaacctctgctcctggtgcggtcagcctgcctgcctttcgtggggaattacaagggaagtgccctcacttgtgatctcaatcccagttgtaaggcataattcaagtggtcacaaagatggggttacaaggaatagccacgagaacgctcctcccacccccagaaccccgtgacctctcctcgaagctgcaccctagcttccagggcaaggctgaatcaggagttccagccctctttccatgcagggctggctggctgatctgggcgtccgtgggaccctacctagagaacatggacactcagggaggagcctgcatctcgccgtgggttggagaagtggaggtggggcagaggagcttgggaatcgccaccggatccaaacgcattgctggcccgtgccctcgcattataaaggccaacgctgggacgtgagtacccaccccaagtctggtttgaggaggtgagtgccagtcccataggctcaagggacccgccacagaacttggggggctgttccaggaggcccttccctcacctgggggtcttttctaaagtgatgaggtctgagaggcagggaggtggggcacacacctgttgtaggaccttcctgctgcccgatgcctcatcacgcccctgccatgatcagctcactcgtaaggctgctctcctgcactttcccttcctcttagcatcgtctttggtgatcacctgccccgaagcgattcacaagggttccacactcactggccatatctgcacctccaccccaagaccagaggtgcccaagcttctttctccacttctgctggtgtacagaatatacattttcaggagtctgccaagctccagaggtataaatagtttatgtcatatccaactattaaacatgattttaatctcacttgtgatgtcggcagcataacttgcaggagggcagctttgatgtagctggtggaactgagatcacattgaacagatgttacagctgagagtctgttagtgtttccatccgcccgtgtgtgcgtgtgtccatgtgtgtgtgttttcaggggaagtattacatggaggagagggtgggaaaagagagaatcttcatgactcagtgattttgtagcacattcatttgaaacttggcagctggacacagagtccagatgtggtgaggctttgggggtgttaagctttctctcccattactcaatctgagggctttgtcttccgttgggtaacatatgaagaccaagagaaacaaacaacaaatgtgcttttgctgagtttggatgcttcttggttgactgagaaaatgagcaggttcacaaaggcagctctgatgcagcccatggtgtccttagtaaacagttggatgctgactgaatgaacaaatgaataaatggaggaggagcgggagcaggaggagggggaaggggggagggagcgggtggagaacgtgtgctttgcttggcaagcacatacaagcaccttcaggctaggggcggtgagcgcggggacaaatggatgaagatcccttgcctgttagggctgtggggacacctgatgaggggcaccactcacctatggctctgcgtcctgacagcagctggtaggtgtggggcactcacaacgtgtcagacactgcgctagggggcttgacaggaaggatttcatttaatcctcactgcaaccttaggaggtaagcatgattacttccatgtacagaggaggaaatcggggcacaaggaggttaactaaccgggtcagtgccactcagtaagtggcagagagttcaaagcaggaagaatgctgtggccttcaccactacccagtactgccttggacgaggctggtctgggaaactgggctgctgggccccaagtgtcactctgacctcattctgacgcctcctaaggtggctgagatgtccttggaaaggaagccagaaagggcccagaggcctggcaagacccagtgtcctctggatgcagactgtcacctgcaccctgttgaacgatcttctgtgggcatgagtgcagaaggccgggtgggctgtggttaggagggcgagtttcccgttgcctggagaggttctcctggggtaatgcctggagcaggaaactgcttcttcccacctctccctgccaggacctacgctgctgtcgcagggggccagctagattgtcacttttgtccaggagtctgtaacattttgtacaggcctcctgatcaggttggggacaggctggggaagaagcgagggtggtggtggtggcagtgaatcgaatggcagcctggaagtaggaagcttggatgctctgtgtctcccgccctctccccttcctgatttggattgcatctggacagagagctctgatccgtggccagtcctcgggcaagaaggggccttggatgtcatttggccaaatcagacaaggaaccagagtcccctagggtgatgtgacaggcgtaggcccagcccacccatgggttgtggagccgtcgtggatgctggactgcatggctttgcggcatctcaccttttccagtggggcttactgctccatgtggctgctcaccacacaggaggaggcggtgctcagacccaggacccaggccagggccagggccagtgagggggaagagccgagggtcggagattaaggaggcctggcctcactttcagggccagccctgcttgcactgtgtgccccgggacctccttcagtcaccctagctctaggcttggccagagctccgcggccctggctgcttgtgaatgaggatgccagaaggctccttggtacaggggtatgtcgggggttgtaggggggacagagatgtttgttaatagctggtggcaagacagtgaagataaagtcccccccgccccaagaactcagcctttgtgtgtgggtatcttgagcctacctgaggttttcaaccatttcttctgccctctggaatctaaatggtgtctgtcaggattctagacactggctgggaacttctgctctcagctgccaagatgagctctcagaaccttaagacctggaccccatctctggactccaggtccctggagagacactcggagcccagaatccacaaggcttagagaaatcagggctgttaggaagtgtttttaaatgcacttgctttaaaatgagtaaaaggctaaggaggacacgaatgccagcctgcagctccagccttgaaattcagagcccaggacagaagcagccacctgcttgcagtagcgttatgtttggcggcagggaggggatctcagaggagagaagtccacttttgagtcctgactctttaaactgaactaatccagtcttgagaggaaggcccctggaacaccttgctgagctcttcttggttctggggctgacaggcaccttagggagacttttaggagactttcaggggtctctgttaggtggttgtgggatgcgatgctggtggagccctgaagcatcataactgtcaacatgaatcctaacacgggccaccgagggctggctgggcaggagtgtggagaggatgttaccagggtggactctggaaatctatgctacctaagtggtcttgggcaagttaatcaccctttcggtgcctcagtttcccacggtagggaccacagttgcaccttctccaaacagttgttgtaaagattaaataaggccaggcgaagtggctcacatctgtaatcccagcactttaggaggccaaggcgggcggaacacttgaggtcaggagtttgagaccagcttggccaatatggtgaaaccccatatctactaaagatacagaaattagctgggtgtagtgatggatgcctgtcatcccagctactcaggcaggctaagacaggagaatcgcttgaacctgggcagcagaggttgcagtgagccgagattgcgtcattacactccagcctgggcaacagagtgagactctgtctcgaaagaataaaaaaaagattaaatgagataatacatgtagatttccttcttcttgtccccttgatcaacccttccatgagagtggctggtgcaccctctccagagcacagcgctgcttgccaattctgaagcctggggacccttcaaataccagcatctccactcagacttcccctccaacagaggggccaccggctaggccagcagaggcagcagctgaccgtatttattggtgtgaaagtcccaccttgtacaggtgttgaaatgtggcctgaagatgtcctttgcgaaagaccctcatctgtgaggttgcatctcatgacagtaaggaagacaagatggtccttcctgtccgtatctacaagctggccaatccacagagctgcctgacccatttcctgctatcagatgggccaggctatggtcagggttgctgggtgtttcaccctgggcctggcagggctgggttgggggagggggtgggtactcacgctggatgtcaatggtgaccgacgtctcctttcctccggggatggctttgttggtggcacgacacacgatgctctggccattctccacgtcaccaggggagatgaagagggtgctgacgatgctctcccgcttgccgtcccgaagcagggtcttgggagaaagggaaaggggagagaaagctccatgtcgcttggctggggtggccagcctgggttgggggtaaacgagcaccagcttagacagaagggggagctgtggatggaggggttcagcttaggagacctgggctgcccatgtctacgcagagctcgggggttaccccctggctccctggcctggctaagtgctgggctgtggaaggaaaaaggaactagacagttttccaccatgtgaaaattagcctggattcacatgctaaaagcacaaaagaaagcaggatgggtttcatggaaaccaggcttcagggaggtcccatgttgaaatgaactcacatctttttgcctctggtgcttgagtgacagtctcaggctctgtaggaagcaacgagatggtttgcaaccagcagggactgtggcccctgagcggggacagtctgcagaggaggcacagtttggggaatgggagtcagagtgggtggggatatgggcagaatcagtgcacatcaacctttcgattatttgcctatataaatcctttcaactttccaaagcgtttcactccctgatctcattagagtctcaatcaaaccataggtgggacagataccattatctcccattggataggggaggaaataggtgggctagacagaggctatggagcttgaccaaactcacatttcaagttggtcctgaaataagtactagtctcctacagcaggttgaatggtgtcctctccaaattcttgtctaccaggaacctcagaatatgaccttatttgggaatagggtctttgcagtttagttaagcaattagtaattagttaaggctcttgagatgaggtcatactggattcagagtgagccttaaacccaatgactggtgtccttggaagaagagaagagagtctgctgggtgtggaggctcatgtctgtaatcccagcactttgggaggctgaggtgggaggattgcttgagcctaggacttggtgaccagcctgggcaacataggaagatcctgtcactaccaaaaaaaaaaaaaaaaagaaaaaaattaaaaaaaaattagccaggcatggtggcttgtgcctgtagtcccagctacttgggaggctaaggtgagaggatcacttgatcccggaaggttgaggctgcagtgagctgaggttgtgccactgtactccagccagggccacagagtgagaccctgcctcagaagaagaagaaaaagaaaaagaaaaagaagaaggagaaggataaagagaaagtgaaagagaagaggaggaggaggagaagaggaggatgaggagaagacagagagaaacagagaaggccaggtgaaggtggaggcagagattggagggatgctgccacaagccaaggaatgccaggagctgccaggagctggaagaggcaaggaaggattttcccctggagcctttggaggggcacagccctgctgacaccttgattccagacttgttggcttctacagctgtgagataattgatttctgttgtgtcatgcaccgaattgtggtgctttgtaatggcagccctaggaagcaaacccatcttaactgctggtctcccaccttcccaggtcattgcttttctctactgggccacaatgtcattccgaagctagttccccattgtggctgctacctccttccctctcctgttcctctttgcagctacttccccatcactttggggcgcactaagtcaggtgcaccccggggagggtgtgctgagtgtgtgtgggggtgcacttccaggttgggattggggtctggtcagtatgcaaaggcttctgctactaggaggtactaggaaggaacctcactatgggtgcagtcctgtttcccccgactggagccagggagtagatgaacagaccactcctccctcaaaacctcccataaagtgacaatggcaatgtctctaattcttatgagggccccggaagacagcagcattatctttgattagccaaagagaaacctgtgttccaagtgagccgggaacttgctgggtggagctaggatttgcacttaagaatgggtgaaccctgagccacagcctctgctgcagccccgggggtgctggacggtgggtaccgtgctcttggcaggacagatgggaacagttagggccacagggagaaacctgtaagctcctagaaccccacattctgggtccttaattcagtgaggtttttctcaacttggggcaaacctcgtggcgtcaggagaacagggccagagcctctatatagaacagcacatcttgctggaggcaaagccggactgtgacattctagagagccacgcggtgcagctgcaggcctgggactcagggtgccagccacggccctgggcagaggggctggaggagagtgacgtggccagatgcagcaagccgggggcaggaccactgcagaggagtgaagttgaaccccaagccaaagcccgggcagggagggagcagcagctggcaccgctttaccaccctgccttgggctcttcagcagacctcatcgagtctataaatagccaagtgataataagaacaatttcctggatgaaactaagacttcgggtagggcgcgcaggggcggggaggtggtgaggagcaggttggtattcttcttctcttctttacatttccgttgtgctaacaagggacatttacataagcttgactctgccaggagcccttccaacggatgggctctgggcggtgggtgccagtggcaggggagggaggggacccagctctaattaggccctctgactgctccccctcctccctgcacccagcgtgctcctccgcctcggaatgatgattaatgacatatttactgggtccaggcgtgtgcttttctgggaaataaaaattctggttcaagttgtttgttccacctaattagagaaaaagggagatgtgttcattaaacaaaaggagggtgaggggaaggcacgtgccccagcaccaacaccctctctgtccccgtggaaggtcccagcacctcctgggcccctagctcgcgggggaccccaggccccgtgcagcgggtatcccagggaggaaggctgggtctgccagctctgctgcaggacgactgaggggaggaaggtgggacagagctggggggcccagggggaaggctggagggagccctgcacctgcaggacagggcgggatgtggaggggcacgggggatctgcacccccgggtttctcttcccccattcctttctgatctcgcctctcttgtttcttttgcttcactccttttcagaaatgaatctcccctaattgtcacttttctcatatgcaaatggagcctctggactttgcagccttgaaggtactgtccaggagaacattctatcatctgcaggttctagtcgcagctccactccgcccctcccttccctgcttcccttcactgagcttggctctggggacacaccatgggcattgaacctcccacctcctgcttcagaaagcttcatgccttgcaggtgagctccagaaggaagtgagttattcatggtgggccactcactgtgggagccaccgcctccaaggcctccctccagtgtggtgagcactaacgtgctgccagcccccggctcgcccaggttgcccatgtgactgccatggtggctcccaagagtccccgaggacccagctcctgtgtgtgcagatatgggccaggggcaggcatatagatggcgtgtgtgcagcatgtgtccgggaacgagcgtgccagggcatacacccccgtgggtatgtgcgcgtacctgtttttgtctttgggtgttcatgggcctctgtccactgactgccgtgactctgcggggccccaggttctctctggacgctgcctgctcaggtgccgcctcagggctgtgcacccacccccactgcccctccctaagggcagggatttggcactcacttctctagttccccagcaccggcctgggaggccggtcttcccaggtatggttgtacacagtgtaccccaccccatggttttcctgcttgggtggcagtggctggccactctgctctttccaaagcccccagggcctcctctgggcagtggagagccaggctgagctctcggaaatgggtgggctggagggcagacaaggggtgggggcccaagcactggtgctaaatatggggtgcccgatgacaggcaaaccgtctggaaaggccgagagtagcctgattgcctggcagcaaggccgcctcgcttctccccgctactcaccttccccacctgctgggtccctttttttttttttttaaaaaatcatggctctgcttccccttttgatagctgcttggggctccccatgggctggttgccacctggcttgaataagggtgtgtgggccaggtggaggatgcgcagtgctttttgccccagtccctgcatccagccttgaggccagaggccagaggggtgcccttcacagagaaggccaggatgagcctcggccacacccagtggagactctaggcccctaagctgggcagataggtgcagggtgatgggtgagtgaccagggagggggtgcccagtggagggtgagggccctatgcatgtgggcacttatccctttcctgagtggggtctccagagctcctcttagcaaaggtggtaaaaggcgaggccagtggtcctggtggtaggggtagagggcaaggggctccaagcagacacagacacgactgtgcgtgctaagaccttgcaaccctcctgcctggcaggaagctgcacttaggaagggttctttctgggctcagcctgtcctctcgcccctcctcttccgtaacccatccttcctcccctgctgtgtggacttgggggctttccagaagaaagaatgtggtctccactctggcgccaggccctcagaagtatgaggaacagggaaggaacccactgtccccagacagcccagggttgagtctccaggaagaagcttggaggggccttttcctgctctgtgcctctgcagccgacacccgctgggagcctgcagtgggcactgcccaaggccccatccggcagtgtggctcgccctgcaccctggaggctgtgacagtggcctgttaaggagaagcatggccagcctgtgctgggggagggactgggtgcttcctctcctgcccttcctcctggggaaggggcctggtgccctccagggctgaggctcatccctcccctactggtcccatggtggagtcacagagagaatggtcggtgagcaacccagaaactttgagaacaggcctggtgttttatgaaatagctgtatgacccctggggcagggaactggggttccccctgtgggacaggagccaataatagtagctcacatttatccagtccttactcctgcccttgacagggtgcttctgatgcataatttcttgtaagtcactctgcaaccctaacagacatccgtgatcattatcactgcattttgcagctggggaaactgaggcagagggtgacatcaccatgttatgttacggatcccaggtttgagctaggccttcagaaccatgtggccagcctaactatgacaccgatgtctgcatatgggaaacgcgaggtccatagtggggtggaccttgcagccgtgtggatccagtgagggggtgacaatcccaacagcagtgcttgttgcaagctcgctatgtgccaggcgtgtttctcattcaactcctcacaagcaccccttaaagtgggtgctgctgtcgttcccattgtatggcaaggacagggaggcacggcaaggtgaggtcacgcagctggaaggtggcagagcccggatccaaattcaggctgccagctcctgagcccacggggataatcatccaccatgtgacagccactgagggcgtcagacccgacagcagccagggctgccctgaggggtcttttctggggtccttggaggctgcctgattttgtgtgtgctcccagcttctcttcctctctgcggctgatgctctggcccctcctcatatgtagcctctctggggaagtcaggagtgctgttggcctatggcagggctccttgcagccctgggggaggagggggtgggctgggtccctgggaggggaagcagaggggttggctcggacagcccccagagcctgctccataggagccctggattgtgtaacctactgggtatactccacatcacaggcttgtagcttctccctgcccggcacacagccccgtgcctggggaagctccactgacgtgtgcgggctctgctggtcacccctttggtctccatgagaaccactggccgtggggtggacagttaggatggtggatgaccatggtttggaggagaggcccagagaaatgaagtgccttgccttgggacacagggcctcttcccatgctcatgtccagggacacattgagggtctcaggcctctgctgctccctggacaagccacagaggggcaggagaccatctgaggtgactgtcccctgaggaatctgtttctcttccggagcgtctgatccaacaccttcattttgcagacgaggaaacagatgcccagggagtgagttgcctgaggttatgcagtggaagctggaacccaggcctgcgactgcctggcgctgccgttcccgtcacaggcccaggagcatggatcgggtcccccgccctgctgtgcagtagtatggtaccaggctctccgaggggccttcacaatgtagacaaggatgacatgttgagctcaaggtgatcctgggacaggtccagcagagtgaccctgacctctctctccacctgatggcatgtgtcctctgcaggacattgactctgctagggtccaggctggcccaagttcagggagggacaggacaggtgctcagactggaaggaaagcccctatccttccttttcattctcctctggacaactctctctctgtgttatatccttgtattacataacaggacagggtggcttcagcccaggacataagggagaggcttgtcttccaagaggcagccatccctccctccccctggacttgtgtctgagggaaggagtttgccctgggttctggcaccaggtgctgggttctttgatcggcagccctggagtgacctcttggcaggtggtcagtttgggacaggaaagacacaccctcagagtggggacgggcctgcctcacatcctcggatgaccaaggccctgcttatctttccaggattgcttagaggactggtgggtagggggaaccaggccgtgtatttccccagtctctgaggacaaggaaaaccctcagacctgaggcgagcgggcgttctggaggctgggcccccagctgcggagcttgggggaccggcttgccctaggaggagcatgggcaagggcagaggccagggtgtcaggaattgtggttccaggcctggcactgcccactccaccactgagaaggacagtcacttccccaccaggcctcaattttctagctgcagacaaaagaggttggcccaggtatactgtaaggcctcattcatcttagaggctctgtggtacattaaccccatctgggactctatgcacagttttgttgagtggagtttggtgggggctgtttaaaaatgtacccagaattttgtttttattcaggtagagggaggccaacagatcaggagacaactgccgttgaaaagacagtttgcggccgggcgcagtggctcagtcctgtaatcccagcactttgggaggctgaggcaggtggatcacctgaggtcgggagtttgagaccagcctgaccaacatggagtaaccccgtctcttttaaaaatacaaaaaaagaaaaaaaaattagctgggcatgatggcacacgcctgcaatcccagctattctggaggctgaggcaggagaatcacttgagcccaggaggtggaggttgcggtgagctgagatcacgccattgcactccagtctgggcaacaagagtgaaactctgtctcaaaataaataaataaataaataaaataaataaaaaataaaaaaagaaagaaaaaaagaaaagacagtttgctactcatagttcccagaggaaggggaggccccagggtcagttggggctggggtgggaggtgtggggagagtgtgggcacagcctctgttgtggcttgctttcataggaaggaatggtgaggtagggttggtggctcagcaggtttaggattggatagcttgaataatttccctgggccctgagctgtaggggtggtctgatgtgtggccctggggagatttagggtaggggtataatgtcctggactatggagcctgatgaaaaaaggctgtgggggcctgggctctggattggttggtctgctttgatataaagcctgcttgctatctccaggaattagcttaccctggtccttccctgggtctgcaaggccccagatgtcaaagcatcataaaatacacaacattttaaagacacaattaatacgggggccagttcagggtgcttccagcccttggtatcgtgtgtgaattagagaccagaacccctgttggtagacacagcagggcaagggctgttgggtaagggatcatgggctggatttcagccctccctggcccctgagccaggcaccttggagatggtggagcctaaacggcttcacctggcagccctggaaagtggccagatttagcaaataaaatacaggatactcagttaaatgtgaatttcagatatataatgactgtcttctttagtataagtatggcttgtgagtatgtccaatgcagtatttggaagatacttacattaaaaagttattatttttctgaaactcaaatttaactgggcatctgtcttagcccagctgggctgctataacaagatatataaactgggcggcttataaaccacagacatttatttctcactgttctggaggccgggaagtccaagatcaacgcagatttgttgtctgttgagggacagacacctggttcatagatgccctcttctcactgtgtcctcacaatgtggaagggacaaggggtctccctcaggcctcttttttgtaagggcactgatcccatttatgaagctccacccccatgacctgatcatctcctaaaggccccacctcctcatacttgggggttaggatcttgacatagaaatgttgggagccacaaacattcagaccgtgattgcatcctgcattttatctgcacccctagaacctggccactactgtccctgagtctcctcgtctgaccatggcctattgttagggtcttccccagcagttaccctaggacatagaggagagagagagagagagagagagagagagcacaagtcagataaaaggatggacacacatacaaatgagtaggagaaccacagcatgaatgagaaaaagtgacacagagtgagagagcaaaaaaagatacaaggagacaaagagtgagagaaaccaaaaggggcaggagagagggacagctgcagagagacagggcagctggttccctccccatccagcccccattatcccccctctacctaagcccagcccctccccagcagccccccaccatcctcctctctacctaacccccagcccctgccaaccagccccccactatcctcccctctacctaacccccccagcccctctccccagcccccaccatcctcttctctacctaaccccccagcccctctcctcttaggcccccatctagccccccgcctaaccccctctctacttaacctccacccctcctagtcccctcctaatccagcccccgctcctttagccccctccttacctagcctcctccccatcaactccctgtccacctagccccctccccacccactccccttgaagcccgtccacacccaccccctcccctccaggcctcaccttggagtaggtggccccattgatgacctctccctttcgcaaccagatgatggaggctgcaggcttggcattgtctgcgtggcaggtgaggttgagagggtcccccgcacgcaggctgatcacagggccccccaggatgacggggtcatcaggcggcactgcggggagagaagcagtgaggtcaggccgaggctcccacctcgggcaggacggcaggcaggctgggaggattttgtggagatggcaacaaacaataattatcacacattaataaaacgcatcgtccgcttgtatcgtaatgatgagagcagcacccacagtgatccctgacatgtgcactgcgtgcttacagtggaggatattcctgccagtcatcgcatccctgctcaggacctgccaggaggggacagggccagcagcctcagcctgcactcccagacccagaagcagagctctgtggcccaggcgatgtctgtggctgctttttaacttctttttccttttttcgagatgaagtctctgtcacccaggctggagtgcagtagcatgatctcggctcactgcaacctctgcctcccaggttcaagtgattctcctgccttagcctcccaagtagctgggactacaagcacgtggtaccatgcccggctaatttttttttttttttgtattttaagtagagttggggtttcaacatgttggccaggctggtcttgaactcctgacctcaggtgatctgcttgccttgcctcccaaagtgctaggattacaggcctgagccaccatgcccggccaacacctggttaatttttgtatttttagtagagatggggtttcaccatgttggccaggctggtctcgaactcctgacctcaggtaatccacccgcctcaggctcccaaagtgctgggattacaggcgtgagccacggcacctggcttttcttttttctttaaatgaagcactgtcacacctgctgtctgagttagtcctcacaacagtctggtgaggtcaacattaccaccccaatgacacagatccggaagccgagttccagcaagattagtgactggctcaaggtcacatggtggcagagccagggctggaggccaggcccagggaacctgggagcaccaggccggccccttccctggcagggagcagggtacagggcagcccttcacagtggagccagcgcttcggagggctgtgtaagcgctggcatctcctgagctcctcactcctccagagcggctccagccccttcatccccagaggcagcctgattctctcctgtcccagccttccactgcattttgtagtagggtcagagacgggtggctcccatcaagggatcctgagtgccaggaagagggccatccgcgtcggagcacggtctccgcagtgcccagcacagagccctgtgctggggaaactccactgacatttgctggccccactggggtcaccctttgattccgatgaggaccatgggctgaaggatggtggatgatcatggtttggaggagaggcccagaaatctgaagtaccttgcctaggacacagggcctttcccatgcttgtgcttggggacacgttgagagtctcaggcctctgctgctccctggacaagccacagaagggacaggaggtgaggcgactgtcctctgaggaatccctgtttcccttaccccaggaggagctgggcccaccagctctggaggctgagagaggcccagggcctctggacacatcaagacgtgagctgtctgtgtacacagcaaacacagaaggggtagttggataacgggggcgtgggaacctagcacaaagggtcctctctgcctggtggccagagaagcccgcccttctatgcaggctctgtgctcggggctctgggctggagaagttcagagctgaacagtcacagctccgggcccgtcctgactccactggctcagccttccagcctcagcctgcatgggaacttccctccccttctcaggggatcgccccgtcagcccttctcctagtccactccggcttctgtgaaagctccaggagggacaggaagccccagtgggggccggtaagaagccaagaagcaaaccttcagaacagctgccttgccctccctgcccggccttggaggcctgctcccacactaacagcacagcagtgccatttcctgaggaacaagcaacctcccagggcttccgagaagccatcactgaccccaggggcagcgagccccggactccaccgagatcctggctcaggaacagagtctgcctcaggcaaccctgcctggccctgggctcttgagccgggaggaagcaggcatgaatgggatggatggagaagacgaccccccagccgcccaccccacaccctttcattagtgcccatgggcctccttggggtgggcctggccacagggcaaaacggaggcggctcagggctttccaccaagtgggggtgggtgcaaccacttgtggaggaggggaattgcatctccacgcggtgagtgggggacttgcagcaggaagagcagggctcagaggtggccagccttcacccttctttcttcaaggcagcctccccgaccaggatggaggagctcgggctccatgagctagctgagggcctggaaaaagagccacgtggagccctggggacagcctggatacctggggcctcagccttcccagtgactgtggaaagtgcctgagagcagagggtggagcaggaagccccttctctcagggtggcttcaggtgcaaacgtgagagctcggaggatctgggaactgaccgctctccagcacggacatttactgggccttggacaggggtttgaagccttgactgcatgctcctctgcagaggttttaaaacctcactgcgggccacaccctgagcagccaagtcccagtctctggaggggaccccaggcatcaggactttggggagctccccagggggtcccatggcaggaccagctttctgggctctggactctgggctgaggggcaggagcctctgcttgctctgagcacagtgcagccaccaaggccttcccgagaatccaagacccagaggacgggcccttcctccttgtggctggagtgttgtgttactggaatatcggattagaggcagcgaggacgagggaggagggagtggggcgtgttgtgggagtgctcaggcacacgcacagccacgcacatacatccaccctcagaatggggcctgattacatcttcccaaataagtggttatcatgctgggtattcatgtagccaggcattattgattggtcttcgcttcactgcacaccagatgggggtgggggctgggggggggtgggggttggtgaggatggaggatgtttgggggccagcaggctgaagagaaatcagcagtcgctcttggcagctgtgtctggcgtggaagggggctcctcattacctccccattcagactcggccaggctgggccaggcagtggcgaggggaggaagtttcagagtggtccccgcttggagatgtattattcatcaccccctcgcaggattggttattatcctcaaccactatagagtttgggcttctaatttttaatcacaaggaaggtggaggcgttagccttttcgtgattaatccggagataaaaatagttgactgttttggtgttgtgcttgttgtcagtcaggaaaaaaatggcattaactgttggggcactgaagcctggggaggactgagcggatcccaggcagagtgggtccccagagctggaagccagcctaagaggccacagcgcggccttagccgggggtggctgagcgacactcctgcacccagctggctcctggggcattgattatgaaagaaacacatcatcgcgggatgctgagctctttacagtttactctcccattggccaggactggagcaggcagcttcagtctccctccctgctctgcccctacctgcccagctctgcagactttgccttgtttgggtgggcggtgggggtacccgtccctttccctgtgtgtgggagggagcccccaaaagctttccccaagttctgctgccaaagacaatggggtctcgggtggacaggtggcatggggagagggaaattgaggccagagagcacaagaggctgacccaaagttaccagtgacgagagcaaagaagggtgagggtgggcttgggacgcacatcctggctgtaactggagaggtaaagctttcatctatttcacgcactaaggttctctctaacctctatactcccctttttttagagacagtttgccaggttggccagcctcgtctgagcaggctggaaaaactctcttggtgccaggacaaggacagcactgagggaatttcctccagtgtccacttggtcacccaactgagacctggctgggcttccaggaattcctcgatgctccatcagcctgggatggttggtctctgagcatggctgatcggtggcagctggaggggtgggggaccagcagcaccaccctcctgcccccatactgcatggtggagaacctcatagacacccagccctttggagagcaagactggttctcatttgactcaatgagcagcgagttccccacaatgctggcagagtgggtctatcaccaacaccaaaccctccaggggcttcccgctgaaggagagtaggtgttgcctgcaagcaccagcacttacggccctcgctgcccctggggcctcggtctgttccaaccactccttacacagcagaccctggccccactgcgtctctgctgctcagcaaacccagctccttccggggccgggcttgccctgctcctctctgtctgtaacgctctttcctgttcctcactctgctggctcttcccgtcaatgaaggtgcagcttcaagagcccttcagtgactctccactacccacccctgcactttctggatcactgggttcatttattatctgtcaccgttctagaaaggacaacaaagaccttatctatcttggtcattgtgatattgctgtatcacacagtaggcgctaaagaaatatttgttgaatatattatttgttaaataaaagaatctcagaaggggagtggggatggggccggggggacggttatcatgggctttggcttctgaggtcagcgttttaaatcttgtgtgtgtgtatgtgtgtgtgtatatatgtgtgtacatgtgtgtatatgtgtgtatgtgtatatatgtgtgtacacgtgtgtatgtgtatatgtatatgcatgtatatgtgtgtatgtgtgtatgcgtgtgtatgtgtgtatgtatgtgtatatgtatatatgtatgtgtatgtatgtgcatgtagatgtacatgtgtgtatacatgtgtatgggtgtgtgtatacatgtgtatgtaagtgtgtgtgtgtatatgtgtgtgtatatgtgtgtttgtgtgtgtgcatgcatgtgtgtgtgcattgggtacagttgggaacgggctgcgtgagtagtgggagggaggagggcaaagcaggagcccttctgaggccagctgggacagcgctgtaggaactctgcgctgctgtggcatcagggttggtgctccctgtctctcctcgagagagggaagcctggctgaggggggcttggtgctgggagctgattctcagcctgtttctccgtggctgctgtcctctgatttgtctggaacataggatgggagagggcggcaggccgagcatggtgacagatcagagacacttggctgagtggggagaaggacgtttgtgggttctttgattttgttctgccgcagacccaggggctctgggagagtcagtgctaggagttccagcactgactacagtggagggaggatgccgaagcctcggggtgcatctcccacaccttcagcatcttctccatccccaggttccccgctgcagccctgcagtcagcctgccatgtgtcctgccctcctgcctccctccctcccaacctttctctcaccagcctcctccatgtcacaagctgaggctatgatagctgagtgaagccatacacggcctgccatcttagagctgatggggaggcccttgccactccaggccagtgcccaagacggacatgtgtgcagccttggcacctcctgggagcttgttagaaaagcagactcttgtgctccacctcagacctcctaagtcaaaatctgcctttgaaaagaccccagacaattcacatacattttcaagctggaggagcgctgctctaagggttccgaggtagaaatcatgacaaactgacaagtgctatgaagggaaggctcactggacaaagagcacgtgtggggacccttgatcccttcacaggctgcctgctcccttcgctcccccggggccggccagagaaaggggcagactgctccctgcttactagctttggagttacacgatcttgtttcagaacagcttcctttgtgtatgccgtttctttagcttggaatgctggcgttctcctggaccactggtcttctcctgggtcactcttacacaccctttgagacttagttcagagggcaccctctctgagcggcctttctagaatctgccagttgggccaagtgtatagggcttctgtctatgatcccacagcatcctgggcatcccctgactcactagctaccacatcctatggaaatctctctgtgtgtgtctcttccctgaaccatgatctccatccggatccccatctcccagcagagtgcctgcctgctgcacagggcacagggtggcatatgcatttgctgagctgaacttgacttgagtcgatcactttatgagccatatgattgtagacaagttatataatccgacaaccttaatcctcttatctgggaagtgagataataaaaatacctatcttgcagggttatcatgaggattaccttacaatatgaaagatacacagagaacattgtaaaaggctatacaaatgtaggttattatgtctaatttttaggaataatatttaggtttgtggctgtgtgaaaagtgctgagccaaggtcctctcattttattctcaatatcttttgaggcagggactattagggtcttcattttataggttaagaagctgagactcagagagggcaaattacttggcaaagaccacacagccataagtggtgaagttggaatttagactcgagattttgaccctacaacatgttctgttggagttagagcagctcccagactatccctgcagctgcagcagcccttccactaacccctgcctttgtcctggccctagagctctgcgaagcgggctctctgcctgtcccagggggcattcagacctggcaggtactctcctcccttccctccccgcagtctgaatttcagagggccccaggaagcatgagcctggctcgcagttggtgctttggcgatgtctgctaagggaacggacgaatgttgtttgtagtccgcccagctctttgctgccttttgtggttttgcccggttctctggttctgggccgcgtgtaatcccagcttccggtttcctcacgtatacagatgcgccacctaatggccacaatggagaactgcaggatgtagagacaagagggagctgacctggttttaagagtcagcttcccagtggtagccgaacaatgtttggagaaattcgtattgagcacctactatacgccaggccctttctaaacactagggacaagaagcttctgccctagtggagtttaccttctagtgggagagacagacaataaatgaatacacaaatacatacataatacaaggttaggtgttgataagtactagaaggaaagtaacactgggcagggaatagatacatcctaaattggcctccgggattccctcctggcttttctccttcctctctggttgttactttttgttttcttcccaccccttaaatgctggtcttccctagttagctcttgctggccatatctcatttgacacactatctaatggaaaaccttcacttttctgtgaactcaactcacatctttaagctgacgaattccaaagaagcatctcaggccagacctctctcttgagctccagagtcatgacccaactgtccacgggccttcgaagctcagcaggtgtgacaccacacccaccgcctctcccagacacccatccatccccatattctgtattttggagaatggccccactgtttggggaccaagtcagaaatctgggggtctttctggattccactctcagtcaccctgtcttgccaactagcctggttaaccctctgaagtatcgctcagatttgtctctttccattcccacaggcttcctggatcagccatcatccttttgtgcttggattacaatagtgcttctcccctccatctcctagtcctctgtgcttttccagagtgactgttacagaagtctgaatattcacctatccagtcaaccagtaattcacccaccatgtgctgaatgtctagcattcctctgtttcaaatcctctgaaagtccctcattgccatctaaatagtctgaacttcttggccactgctgactcttcggccttgcttttcatcacttcttacctcaattcctccttgtggataagagccacctgcatttgttggagtaaatcgcttttccccaattgcccctttccattttttatttatttatcttttttgagacagagtttcactcttgttgcccaggctggagtgcaatggcatgatctcggctcactgcaacctctgcctcctgggttcaagtgattctcctgcctcagcctcctgagtagctgggattacaagtgcccaccatcatgcctggctaatttttgtatttttagtagagatggagtttcaccatgttggctaggctggtctcgaactcctgacctcaggtgatccacctgccttggtctcccaaaatgctgggattacaggcatgaaccaccgtgccgggcctgcccctttccttttgctttgctaacttgaaggtcgggcagcttgggtttgaatcctgggtgctatgtttactggcttgtggccatgggaaaactgcttagcttctctgtgcctcagtgtccttatttgtaaaatatgaattaaaataacaaaaccagattcactgtatagttgccagggtcaaggaagatgtaacatgagaaaatgctttgtaaagggtctgatggatgatgtggcatgttattggttctctaagcagactgggctcattcctttgaaaggcgatagacgggcaggggagctgggacttagaagtcccagattgcccccttggtaaagcagaggtctatgtccttttccctgctttgccctgctgggagctgggtgaagaccctgctgctcccatgggtgattccacgctgccctgcctggcttggcatcccctccctctgggcccccccacattctgtgccaactgaggcacacactgcttatgggctgcaaaggcacatgtgagccccatgtggagcagagagatgagccatctcagctgagctcagcccagattgctgactcacagttttggagtggtttattatgcagtatctgcattcagaacacaatactccaagatatcgcatcttagaagttgagaaaacagcagaagcaaaaagtttactctccaatcccctgccttcctgggcgagagctagctgtaaaaaattctttgacccatctcccctgaaactaggtcatgagatcctcattccagagggatcctgccctatactcagaggaaagaaacggtgtacaggaactcaaagaggaatgcaggcaaggccttgctaagttcttctggtttgttaccatgaggtcatacccccttttttgtccaatcacatttctgcacaactgcccattctttgttgaacataagcctacaaatacacaattttcccatggcatttgggccttcatttctgaaagctcacataaaactttggttaaatacatctgttgcacttttctcttcttaatctatcgtttgttacacgggtgtcagctgcaaaccttgtaatggatgaggaaaatatattactttttctcccctgcagcagcaaaagctaactgatgtaacccagtagtcccctgctgtttgattcagaactgggcccacggcatcaactgtctctccacttccctccgatccattctccctccactatggccaggtgactgttctggaagctcggtctgctgctcacaatgttcaatggttcccactgctccagcacaaaaatcaattcctcatcatgggggccttccccggttctctccagtgaggtctcatctctgcagctttctcctgtgtgaccattaactcttctgtgaggatagcctgcccttttacaaatacacgctttggcttgtgaagttccctttgctgggaatctccttgcctgagtcttaactggctggaatcccagcctcttttcaatcagctcaaaggcctatcatgccttgttaactcttggttattctttaagactcaggctattgtcacctcctccacaaagtcttctctcaatctcaacccctgactctcccacctgcagcctctgcactgccataagaccatgtgcccgcctcagcaggtacatgtggtgcctggcgccattaccacctgttgttcccctgaggctgtgagctccttgagggctggtccttgccaaattctctctctagtacttagtacagtgcctggcatagtgagcacttaataaatacttgttgcctggtgccttgcctgatcccactgaattagaagccccctccccacctgagcacctcttacactggtcctcaccacatctctattgcattgacttgtggacctgtttcaggttccctacagttgcagggtaggagtcctggcgcctctttgcctgtctcccattgcctagtatgttaccttggatgcagtcataaaaaaacagcaccaataatatgaataatagctaacattgatatagggcttaccacacagcaagaactcttctgtgtactttacaaatatcctttaatcctcacagctctatataaggtagatacaatgacgatgcatattttggaggtgaggaaacagccacaaagtagtcaagttacttgcccaacatcacatagctagtaagcagcagagctgggatatgggtagggtttccagacttaacaaatcaaagaacagtaggccctgttaaatgtaaatttcagataaattaaaaaatggtagtgtaagtatgtttatctgaaattcacatttaacagggaatcctgtattttatctggcaatcctgtagatgtgttaattacatatatgtgatttaattaatgtaggtgtgctttccccctcttcagaccctccccgcctccacttaggtctatattaagaagatgtggggcaagatgcaaatgggatttttttttttttttttctgagacggagtctcgctcttgtcacccaggctggagtgcaatggcacaatgtaggctcactgcagcctccgcctcccaggttcaagcgattctcctgcctcagccttttaaatagctgggattacaggcacctgccaccacgcctggctgatattttttggtacttttggtggagacggggtttcgtcatgttggccaggctggtctcaaacgcctgacctcaggtgatccgcccaccttagcctccaaagtgctgggattacagctgtgagccactgcgcccggccacaagtgggattgttaaaggatgtggcatccgatatatttggcagcacaatcgcacagacgtgtctccaaggaggttggggacagagagaaaagaggaacaaggagcaagacgcaggtttaggatgatggcatgtagctcagaggaaggtgtgctggaggctgtttcagttctgctcctaacctgggggtggggggaaccctgaactagctgacttcagaggtcccctgcaaaggtttgggacactgggaagcccacttctcagctggagctcatattgtttaggggataagaagggaggccctgaagtcagagtgcctggctgggcttctggctccgtcattcactggccacgtgaccatgtgcaaattctctgtgctggatgatgttaatgtcatagatattatagtagctgttgtacagggctggtgtgctgtttaaatgagttcatgtaagagttatgcagtgtcttgtcccagagcttggcactgtagtaagaacccactaaattttagctcttagtattattgttgtttatttaataagtaactccacatgggggcagagtagcatattgcatgtgaaatgggcttgtttccacctcttgttctgctattaccttgttccatgcccagccctggactcctgagatggaatggtcagtaccttgcctcaaagcacctttaaaccactagagcgatgacaaggaggtcacagacccaaagatcccacagctgtacaggtctgatgggcagccctgctgcctttaggcaggagaccccaagggagggagggctagtccagtgggccagggaaagggagccaggtgctgtcagggtcaaagtcagcagtggcttggttcgctccttaaattaggaagggtgaatgtcctgtttatatttggttaaaccctgaaagagggtctgagcatctcagggcagagctacttgtgaggagacagacgtttcattaataatgagtagggatgtaagtctcaggctgtatgcagagtggaggaagggaggtgggtagagaagggagctgcagtgatttgcactcaagcagaccagtgtgcctgtgccggctccagatgacagagggtgctacgtggccgccgtctgcacagcaagggtgagagggcttgggagaggccagcagagaagggacagtggggtgggggagtgcatcaaactggagagaggaaggggtgagtagggctggggcaggaaggccagtgtgtggtgctgggtggcttacactcaccctcccagtcctgcggagcgagagactttctcctttctccagcccagctcctatgctgatggctgcaggatgggtgagagcgcttcttaggtgtgtttgcaggaataaccggcacatgcccccttgcagccgctcacaaagctctccagctggtttcgaccttaacctgatttggggtctcttttgctcaacacagctgggttggtgggaaaagcccatcatggtggctgccgtggacttgtataatccatgcttcatggtatggtgggcccttgcagtagccttatttcataggtgggtaaactgaggcataggctggccaaaacatttggggcaagtcacgcaactggcaaggactctggctcagatcctgctgccccaaccactcagtcctaactgcggtaccataggctgtgctagcaggaggatctgcattggttcacttcggtagctttaatagcatcaaggcagccatcctgacccagcaaagggccaggcagggacttggagtgtccccgctggtcccataaatagaagcagaactgatatagttggttttgctatgggctccccatccggtaaatccacctcctcaacgagcctcatagtttcagtaaggacgaaaatgaggccaggtagaaatcctgcctaccgataccctggagcctcagaagtcttagcagaaatggaggggcgcaggaagatggtcattacattaaggggtttaaaaaataagcacaagacattccagtagctttcttttgagatgacagattaggaatactgtgttttgcaggataaaagcatgcatttgttccatatcttggttggttacaggccagcagggcaggcaggaggagggaatagagaggtgaccatgagacagaagggcaaaaattaaaaagacaggcaaagaggcaaagacacagggcggggcgtggggtgcaagtcacctgctcaggaagaagatggatgtggggagacacacacagtcctttgggatggagcaccataaaaccaaatggcagtgttccaaggaaggaaacaagcaaaacactttctctaggcctcttgctacaaacactcatttcagggaatcccagaaaatcactaaaatatacctttcaactttatgcaaatttaccagatccactgtttgccagaatcctaagaggaaaaagtcaaaatccttttccgacctgagccttcttctttttttgttttttctcaaaaagtacaagcttctacatttgaaaaagggcaatatttttagaactcattagatgaaagtgttttaattctcatctacagtctggccttatagttattttttgaaatctcctctgttcctcatttttcacatttgccccattctggggagggaggcctggcctttttaccctgtggggacagtcactggaagtgagcttcctgtctttagccacagacaactccagagtggaactcagcagggagttggccgccccgcactccagcatgagtccttctgtcctgtcctgaaaggggtaaagagaaacttggtagcaccgcagcttccactacggggtgccgctcacagaaggcggaggtggagggagggaatggcctcttcccccagggtgtcttctttcgctccatcactgttgaggtgggatggggctggttttggcactagagtgcttacgatcagaataagccccttattcagaataagaagagcttggttactgggtaaggaggggactgtgggcctcctatgttcatctgagacctattcaccggggcagggagggactcctcatctggctctgattatccctacaattaagtttgctggtgttggtggggatggctttggggccacccaggcccctgcatctccagcccttggtgggtgatgtcaggcaggtgaagaaagggcacagcctttgctctcagacagagctgggaatgatcccacagggtgaccctgaacaagtttatcaaccttcctgagcctcagtttcctcacctgtaaagtggagctaatatgtgcctcgagtaatgcaggattaaaggagaagatgtagtaggtccgcagtcgtggaggcagcctgctggtcagcatgaagacaaaggctgctgctgaagacccactgccttctcttgtgtgaagatgagctgctcccctggttaaggcagagtggcaaggaagctcagaccaaatgcatttgtgcagtggaagagaagcaacatggaaggagccgcggcttccagtgacctggcctgtggcccagggagctgcagatggaggctccgtgagctggagcccacaccctcccaccacccatgagccacacagggaaagcctgctaggtgactgctctcctctggcctctccctgctcctacctgttccccacaggggatccccccaaaatgacgatctaatcaagttgtccctctgcttatggtgtccaaagccccacagcacccaggcctggccacctttgcagccttaccccgtgcccgtctccagccaggaagacgggatccttgccgcaggccacagccacatagccacgggcctcggaccctggatctgtggctctctcctccgagactgcgcttcctttcctttcctgacttgtggacacctacacgatgttcagtgtttgctcaaatgtgccctctgacctccactagactgcgcttaggcatctggagcgcagcagtcagtctcatcctggggtgcatcccagggctcagcctgggacctcagcatggggctgagcaggacggaagctgtagatggatgcgctgcgtttgcggtggagagccggctgcatgggaatcactgctggctggacccgggtgcctggctcgatgggagcttcctaagggaagcagccctgtcatgttcctctttgtctctctctcctgccccagctcagcctgcacggagcaggtgctcaacagatgagcaccccatcaatgatggaagggtaagaagagacgcctgcatcaggtgggagttaggtggggaaaacaaagcttccagaggggatactttgggaggcgcagatctaggacacattgataagcatggagtgtcaactatgttccaaaagcttcctgatggccctattgttactccatcttggattcctgggtcaattttgggagatgctgagatctgtagtccataagggcattgctggatgcagatgtgtgaatcaccataagtttggacccaggacagctggtgtcccctggctttcctgagaccttggacgtgccccttcccctctgcattccccactctccaccttccaccacccctttctcaggggcccatcagctaggcctagcagcccttggatccttaatcacctctgttcttttgctggctctctctgaggcttccctttcagctttgatgagcaactcacttgccatggaaagtgtgttgttcatggcggatcctctatcaaaaaacaggatggtgtcgagttgcagtgggtgcgctgggatcagtccgggttaaaatacgtgggtctcagctcagatctccatccctggcactgtgcaggaatctgggcgtgttagtgctgcatacgttggggaaaatgagacgtgttgcttggaagcagcccatgagctgcttcgaggagtgaacggggtgaggtgtccagtgttgctttgaagtgaaatgttttggatgtgccttaaagtcacagttagctcccatgatgggcattcgtgtttgtggccagaggcatacataatccaaatctggtgtataattgagaatattatttgcatttggctttggaatgcattgtgtgtgtgtgtgtgtgtgtgtgtgtgtggcgggggcgggggaggcaaggcagctttactttctgtgtatgtttattttagactcccattagcattaatttgcattcactggacacagccgctagggagaggtgagcagagctttctccccatgaagtattcttcagcctggccctgtccgtgagccaggttattggaaatagaccatgtaggcctgtgttccacgggtgctcagaaaagaccatgtaggcctgtgttccacgggtgctcagaaatcctgggggctgagatacaacctcagtgaacaagccactgggccagggatgcagagctgtgtttgtggtgagacctgggagcgactcctggactcccggttccaggctgcatggccttggatacgttaattagttatttgagcctgtgtcttcgtcataaaataagagggataataattctgtgaaggttaggagaagttccatgggatggcatttgtgacgtccccagaacagggctcagtgaatgctcattccttttcttgtctctcctccctcctcgtctcccaaagaatgggtctgccttcttcatctcttgcgagtctgggactccaagggccgagcagagccggcagtagcatttggagtcaaataggaagacgccactgcttccttctggagtgcaaggtcaggcagggatgctcatttgctcttaagggtgcagggggtccacaaatgcctgaggatccacagcccacctgcacgaggagggggcgtttggagggtggaggagagcctgttgtctctttggagaatggggcagggctctgtctggattttgggtccatcccgtagtggaaaggggtcctatgtgaacagaagggagggcttcagataatcctgaaaccggaatcccaaagacaagccctgagtctccaggccaccactttctacctgcgtggactctggcgagttgcacctccccgggcgtcagcgtctgcatctgaaagtgggcatggcggtgaaaccacctgagggtcaggaaggctgagtgaaggccagaagcctgtgagcctgaaactctgctcaggtgtccgaatgtaatgtgagcccaaggagggcgggcgcgtgctggctctgagcgggtgctttattgtgtgatgggtggggacacttgctctcagggggaaagaaagcgccctctcttcctgcagggctggctgagaactaattcaaggccatgtgactctggctaaagcctgcatcctggttctctgctcccatctgggccagactgttggactccagtgttgtctgtcccccgagtcgaggtctggggcaggtaaggaggccatatcaggaacacctgcccatgtctgtccccagagagaagacccaggagttcaagcatggtgcagagaagttgagcaacatgcccaaagcagccaagattaccgtttctttgtgctccccacacacagatttggatgtttttctttttttcttttttctttttttttatatttatacggagtcttgctctgtcacccaagctggagttcagtggcatgatctcggctcactgcaacctccacctcccaggttcaagcgattctcctgcctcagctgcctgagtagctgggactacaggcgcgcaccaccatgcctggctaatttttgtatttttagtagagatggggtttcaccatgttggccaggctggtctcgaactccagacctcaagtgatcctcccgcatcagcttcccaaagtgctaggattacaggtgtgagccaccacgcctgggagatttggagtattgatagagggatttcagaatctggacttttattgtctcacttcccttcagtgagccaaagggccccatccttgcttacctcagtttcctccgggcttataaaatggacaaaaggataagttgcagagggccaccgaggaactgggaggatgatctatagacagtctcctcttcactgaaaggggaagatgggctcaggctgcagcgtgagggagtgaggttagacatctggaagaactgttgttggagacacagctggggaagggaggtcaggcctctttttcccaagcctgttcccctacccccgatgagggatgaggtggatgtgacaaggtgacatgaccctaaggcagggggatggacctggtggctctgcaaagcccctctcagcccctgtccactcaagtacttcctcattagttttgctgaagttacttccctgctcccagttagcccctgtccgtccagttctgagaggtgtttctatctgtaggggccgaggggctaggggagcatggggctggagtgggaaggaggaggaggagggatgaggctgccaattgccaccgccacacagcaagcgtcacctcagctgttggaggggaacagccaccaggccatttttatgacttcctatcaaactttgataaattgactctgaaagggccttttcttccaagcagttcatgcctcagtgactgttaatggtgaaatatcaagatgctgagggggctctgagctggaccgtgcagggaggactggcttcttacctgccccgagacccagctctttcctcctcttggatgctctggagagggagggggcaggactagatagagacctccaggcagatggcaaggttggtctccagaaaagacagaccaggggatgagggtggaggaattaagttagacatgccgcagaacttcctggccgtgggctgagtgacccaaaaggccgtagaacagcctcggtgctgcggctaactgacagggggcaggaattggcactgcttgttgcacagcaatttccctgcagggattgacgtggagcgtcacaaagacagtgaggtaggcagtgaggtaggcagagtagcaacctgcctctatctcatggcctctcagggcaggcagcagccctcctggactcaggaggaaagggctcagtggggaccacaggcattgagcccaatgcctctcaggcatcatgcaatgagaattggagctgggctgggcgcggtggctcatgcctgtaatcctagcactttgggaggccgagacgggtggatcacgaggccaggagattgagaccatcctggctaacacggtgaaaccccatctctactaaagatacaaaaaattagccgggcacagtggctcacgcctgtaatcctagcactttgggaggctgaggcggatggatcacgaggtcaggagatcgagaccaccctggctaacacggtgaaaccccacctctactaaaaatacaaaaaactagccgggtgtggtggtgggtgcctgtagtcccagctacttgggaggctgaggcaggagaatggcgtgaacccaggaggcggagcttgcagtgagctgagatcgcgccaccgcactccagcctgggcgacagagcaagactctgtctcaaaaaaaaaaaaaaaaaaaaagagagaattggagctgaacctgaacttcaagtccagagaggtttccctacagcccccctcacccacagcagcctgcatcttctactctgcccccagctggccccgcctgggcaaacacatggtgacagggcagtcgctggcccagagctgcttcattcctacttctcccttccttcaaggctggttctgggtcccggaaccatcctttcctggttcaggctgggtgcaggccgtccagcaccacctctctgactcaaggctggaattagtggggaggtgagtgaggctcttgtctcgggcacaaactttaagggtgtactcaaaaccccagtaatggaaataaataatatcttaatgcaaattaaacaaatcagaatgaatgtaaaaatatccacgatgaggaaaatatcacaattttaagtaaagacaggattagggagctgcagttaattaagaattgtttaagatggtcacttggtcaagagaaatggtcaaaatgccaattctctcagtcgaaaatgagataagcaaagaagtagatgattactattactggtgagttattttccattacagccaggaaagtaaaatgaaatacattctgtttttgctgtaaataaaatatttaagtgtaacataatgttggggattttaatacacctgcttttaaatgtttcaatatttttccaactacttcaatgttctggaaaaaatttaccacttaaagaatactttaaaaatataaatgaggtgcacgttttccctcttgctgcagggtctattgtgacttggcttggtgctgttgctgatcctatctttgtctaatattttgatattttgcttatcatggattttttcacattcatttggatttttaaaaatattgctttaaaatattatttgtctagattattgattctttgggtaccctttacattttgtgcctgagaatgatgcctcactctgaacttagttttattctgttcccagagagggaagctgcctctctatcctgtccttggtggggataaaatggaaaaggatccctcctcgggccctgggacccacctggggcatgttcaggcctgaaactgttttggggcggtgagcgctaggacaggcgcaggctgccaaggaaagatggatgggctcccgaggcccacagacagagacgggcagccactaccgagctcatccatcgggacccctgtgggatgacactcaccttaatcaggccacaagggccccgggcctgagggatgcgggtggcgtgggacggggagaagcgggtgagcagacgctcctgtaggctctaagttggtgtctggagaggagtgagaggttcaaccagggtggctaggctgtgcactggccaattccagtgggcactgagcacttagctggcccctcttaggccctgacctccaggcaagtcccaaggtctgttgctcggaccctgggctgtgctgtgtgtggggaaggactagcaggaagggaggagacagatggaggaggacacttagggcagggcctgcaaactggctcttccttgcctttcaggaactcccagtggctttcccttgtttgcagagtgcagtgtgacccatcagcttgacttccgggccctctgtaccctggcccaagcctctcttgccctctgagccccagagatcctctacatgaacctccctctctgcgccctacctccagcaccctctgacctccctgcctgaccccaggtggttctgctttctccccaaagcctccctcgactgtctgtgttcctcgtctccgctcatccttgctggccgggtttctggttgtggctgttgtgtgtgtggacgtgttgctaggaatgagggcctgagttattgtttatacctggccttcctcctccgggtctagcgccaccccagcagcagatgcctcaggaaggaagcgaccctgttgtgtcctccctgctgtgacaccaggtataagcagaaacttatggtcacagtcaggaccatggaggaggaggggcactcagagattcacctgccctctctgagcccatgtgggcactccctgcccttctcaccgctctccttgtaaaaggcagtgctgtgcagcagcctgaggatcaggacactgggactctagtcctgacactcagcaaatggcaactgcatgctaccaggagctcaggccaaacaccttgggattgtccttgacttgccctttctctcgtatcctaattgctgtgggctccacctttgaaacatgcacagatcatcctttctcagtatctgcactgctactaccccagcgctccagcccctagctgtttgcatctgcatagcccaggcaacagacatgtgaccccagcccctcctatgtctgattgcagagatccagaaccattcagctaagccaggctcagtttcttgacctgcagaaactgtgagagctaagaaatgattcctgtaattttaagccactgagcttggaggtgatttgttatgcagaaattgacaaccagacagattttgcagaactagccagtcaactttcaaaggtactttgtgctcggaacattgagaggcactgtgctgtttgcaaaatgctttctatacacgttcatctttctctttaccagaaccctgaacactggtaaggcaggcattcttagtcctcactttatagatgaagaaactgagggtcagagaggctaagtgatttggacaagggtacacagctgaaaaatgaaagggccagtcttagggcctaggaattcccatgataagttcagtgccttccctgccaccccatggctgccatttcttctcactcccttcacaaatgagaacccaaggtgttggccaagtttggagggaggggtgggtgtgatggaggcaaagggaaggaagaccacatccacagggtcttgggaggtggggtggagggacattcctggagaaggaggctaagtctggggtaggtgtcaagagactgagggctactcttggcttcttgtatctgccaaaacccaaacagaagcgctcagaaatgttggagggcctgcgtgcgaactcaaggcctgaggctgtaggcagggagtcagggctggggaagctgggctcagccaggggactgagacataggtcacaaatctaggagacttctctctggggcctctggaagctggggccagttctccagtgcctcaatgtcccggaattgcttcttggaggccaatgagagtgggcagaactgagcaatggaggaggaggcccacccttgctgtagggaaatggccaaggaaatgcaccccagcctgggaatcctgtcagggagtggggtccagtgcttagccagagcagctgcatacaggaccacacgtgacacagaggcatgtgaggctctgcatgtgcctgggcttaaagcctgcttggctgtgtgtgtgtgtgtgtgtgtgacagagagagagcgagagagtgtgagagtgtgcatgtgtaagagagtgtgtgagagtgtgagtgtgtgtgagtgtgagtgtgtgagagtgagtgtgtgtgagacagtgtgagtgtgtgcgtgacagtgtgagtgtctgtgtgacagggtgtgtgtgtgagagagagagagagcgagagagagtaagacagagagagagagactcccttttccccaaaatgtcaccaaggggggtcattttctgtgtgcctgccatctctgttcccagtcaccagcatattgcaagtcaaagggaggcctttccggtaatttgagcatttccaacaaataactctggtctcccagtgcaccagcctacagtggccgcagggccacaacgcactcttcccagagctgctagagctcacctctgctcttcagctcagattctagttggcatctgttatcacagggaactctctctggatggagatgctcaagctcagagaagtgagcaaactctcttctggttgcacagcgggctctcagccttcccacttctggtaagctgcttgaactgagaagtcactgatttttctcaccagatgaagaagccacgccagtgcacatggatgcatgcctactaatgttcagccccacctccaggtgctctcttggggagggaggggcccctataccggtcctgggtgggagtttagtgtagctcctccttcagtcaccaagcactttctctgtgccaagcctgggcctgagcctggagattccaagaggattaagccatggtctctgatccccagagagtttgtgggcccccgtggaatacacacagccccttcctaaccttcctaggccctgcagataagtgagtcaggcatctggctcagtaaaaagtgtcttctccattttatggacaaggaagcagaggctcagagagggtaaatgacttgccccaaatcacacagccagtaagcctgcttagtagctctactgcatcacactggtctggaccaagctgattgagtgaaagggggcagagttggggtggccatcaaacccctaaaacccgaggaggggaagagaggggtagcacaaaagaggatttactttcttcccccaaaatgatgtcatcagctaagacaaaaagaaaaagaaaacgcccattttctcactccaagtttccccctcattaattttaatctaatttgctcataacattcctcagtaaacagcagcctctctttaataagccaggctcttccccccgaccctgcgattgtgttcctaatcagccagtgtatcaggaaagacctgctgctaattgtcgctaggcatcacactatcctgtctgtcaggtaaggggtggcagcgagagataattataatcagatctaattagtaattataaaagatcccgactagaaattgttttcagttaaatattcccagagaggtgctaatggtctccggggcatgccaagtgtcacagccaggaggggaaggggcccgtgacctggcaccctgtgacgacaagcagaggagactcagtgatgagaggaatggtgtgtccatggggacagagctggcctggcgtcccagtatcctgcttcctgggaggagcaccttcccttctgcacctaaggttgagtccccctcccacaggagcacctgcgtgggccctcagtaaatgccagttcttcacaggctcaggacctcgacgcacggaaacttctggatcattaaagaagctgtgtgggccaggtgcagtgggtccgcctgtaatcccagcactttgggaggtggaggcgggtggatcacctgaggtcatgagtttgagaccagcttgggcaacatggccagcatttaatgcaaaaattagccaggtgtggtggcacatgcctgtaatcccagctactcggaggcagaggcatgagaatcacctgaacctgggagacggaagttgcagtgagccgagattgtgccactgcaccccagcctggacaacagagcaagactccgtttcaaaaaaaaaaaaaaaagctgtgcgttgctcaggcagcatgggatatttctgctggaatcgtcattgcattgaatgggattaaaggctttacctaggagtcccctggctaacgaaaatccattgggtgactctccgccccactttagtgcctcctgcctcgggacttcccctttctttttcatcgttagtaagcatctgcaaactcccggttgccctacttactttctgttaacaggacctaactacccaacacttccctgccttcagattcacgccccataccctgcatggttctgttcctgggaccctcggatcaggcgatgagctctcttaaacacctaggacggctccacactgcccacagccaaattcagatgctccagcgtggctcaaagccctttccactgagccccaacctgttgactgggctgacatccgactacacttgctcaagcattgcacgccaaacatcccaaacgctcacgttagggagtgggggcagggtgggcgtctatctttctgtgcctttgattttgttgctatgattacgttttcattttccagctgctaaaatcctacccattctaccaagggagagttcggtagttactgaagtcttgttactgaagtcttgtgaagtcatcccagattttctgagttgaaatgaacacttcctcagtattgtgcttatatattcgagggcttcttttatcctgcctgggatggtagtgagttgtttatgtcttctccctcctttggcagtaaactccttgagggcacagagggcattttgctatttctgcatcttcccattgggtctgatacaatgcttttgcacatcgtaagcatttaataaagatgtgaaggataaacgagtgaatgtattaatgggaagcttctacccactgactgcactatgatttcaatgtaaatgcttctgggaagccgacctctagttccccaggtccagatccttgaacctgtctttattattagatgctgttgggttgtcggagtacgattaggtggaatttggccagtagttgcaggaatctcagcctccccaaagccacctgatgtgaggctagcgtgactgactgaggagctgtatttttagtcttatttaacttgaattaatttaaatttaaatagccactgtggctagtggcttggtgcatctcagctgagagaccttggagccaccactatgtagggcagcctggagagtccagactcaaagcctgcttggtgtctggtgagcctggctacaagcgactcacattaatttagttgaaaaacaggatgtggctggacacagtggctcatgcctgtaatcccagcacttcgggaggccgaggcgagtggatcacttgagatcaggaattcgagaccagcctgaccaacatggtgaaaccccgtctctacaaaaagtacaaaaattagctgggcgtggtggcgggcacctgtaatcccagctacttgggaggctgaggtaagataattgcttgaacccaggaggcagaggttgcagtgagctgagatcgcaccactgcactatagcctgggcaacagagtgagactttaactcaaaaaaaaaaaaaaagaaaaagaaaagaaaaacagtatatattttcactgcattcttatttttttcagtgctgataccagatcagcatactcataactctgttaaccagaatgggagactaagtggggaaatgccacgctctgaccatgtgaggagttcaagtataatttacttcattcacagcttcttgaatggctgctgctggtctgttgcatttgtccacctgtttgcatctgcatgcggatcccaaatgtcagcctttccccttctgacgccctccacccgctgccgagacatctccgtgtagctttcctggctctgcctctcccagcctcctcctctgggtttcatttccttgctgtgagccttgtgcgaggcaggatatctccagtgcaaggacactactggtggacagctggtccgtcccacacttttctctgcacgtctgaggagtccaggaggactggctgaggctgcaggcaggaagctcagttgggtgaacccaggcaaacccaggagtcagcctggctctggccctagcttgaacgcctcggttgtagttctaaagcctattcatttcctccatgttcacatctttaagaggggaagacggggctgcagagggagaggagccagcttggggcctggggtgcagtcttagagactaaggaggctcctctggggagcgagggtgcccaggtggggaaggcagagcgcaggtcgagcagattctaccgcagcccgtcctgggtcctgttgatgtgctacacattgcagggagcattttcatcccaggcggtgcgtgacaaagctaggatttgaacccaggctgttcaactccaagttctgggctctttaaaatagggcagttattagcagggaaggaacacactgcccactcatctatgacaaatcaattaatttgtccaaattccactcatgctttcaaactcacttaaaccctccttaaagcctacacttgccaactcgcctggccctgggcactgcttgcctctgcctgcctttgcctccttttcccgcttctgttcctagttcaacccccacccacattgtgagctccctgaaggcaggtccatgtctggggtgggccaggtgaggggtggaaaacatcgataccagtgacttacatgcacccaggtgccaaggtaagcacggacgagtggggactggtgggccacatcccgcccaagggagcagccattacataattgtttgcaagcaggcaaacaggcataaactgaccaggtctttgtaagagaagccagaaatcagaatttttttttaatataaaaccccccagaatcttaaacatggataatgaatgtaaaaaactctacagatactccggaagctaaccggatccatccatgtgcctgccctggcctccccttaattgtcagctgctgcatatgaatccaggttcagccattcaaaagttctctgcccacttgaaaagggtctcaccttgggcagatctcatgctgcctagcacaggggatgcatccactcaccgcactggaccagcacaccagctagggaagcacagtttgagagctcctgggacctgtcctggctgtgctgcccacagcccctcctccactcctcctggcaagaggaaacaggacagctcctcctgcccaggcacagtcagaagaagctgtcccttctgggcaggcacacctcagagggaaagcaattcaattaagccctggttcacagcgagtgctaaaaacctccctctggagaaccattttctgctatagatttttaagaccagcagctggagaatcactcttcctttttctcttttggtgctgtgtctctctagtcaataaataagtgggaaataaagtatttgcaagaaaatagaatgcagtcgaaaggtaaattgtggacttaaaagcccctaagagactggcgcagacttggaaatgtttcctagtttgacacctcttgcttctctaagcccagcttctggctctccgatttgcatctccaaaaggtgatctttaaaactgatttccttcagttgcatttcattggtgtagaaactaagcaggctgttgcattacagtaataacatcaacatttcacctgccttcgccttaattatttttctctcttgcgatggaatccatttaataagatttacaggtggcaaggaggtggggtgagctggtgtgcggctcagataatcggccaagctgatttctccctcattgggtgtcaccagtataaaaacatgaactaaaagctttgcagcgcttaagtaataataatgtcagcatttcacctgcctccccttgattatttttcctccctcgttcttgccacctgaacctgtttagataagattgccacacagatagaaaccaagggctctcattctcttagataagctgctgtttttctatggtttggtgtgaaaagggagtgttgctggcagaaaggctctgtctcagatcttcctggtggggggcgtccgagcctgtggatcctgggtggaccaaaggcagcaatggagtagggggcaggtggctgttaaggtggatgtgggcactcgggtaggtaccctggcctgggagcagaggaggaaccatctctaaacatctgctctctcccctagatgcccctaggggatccaggcagggacgaatgggtttcatttgttgagggggaggggttctgattatgcagcactaggcaagtctccagtgtggtataaaaaacatttgggtagccctagctttacaactagttagctgggtggccatggggaaggaacccaacccttctgagccatagtttcctaaaaacaaagaggtggtttgctgtggactgaatgtttgtgatggcctccggctgcagttaatatattgcaactctaacctccattgtgatgatgtgggaggtaattagggttagatactgggaggtaattaagctcatcagggtggaaccctcctgatggaattagtgcccttgaaagaggaagagagagaatctccctctccctctttccctccctctccttctctctctgtctctctctctccttccttccttccctctctctctttctccctttatctccctcttcctctttctccctctccctctttctcccatgctggaacccttaactcaaacttccaggctccagacacagtctggagaaataaatgcttgttgtttaagccacccagtctatagtatttgttatagcagcctgagctaagacattggtctggattatcttaaattttaaactttaaacttttggggacttactgaatgactcctttgagaatgtgaaaccactccccagaaatgtgcacatatattctgaatattgcgtccaagctttgtagggataaaaggccccacaccaaaaaccttggcatcatctgtgacccctctctttctctcatagtaactgtccactatctctgctgctgctattccagcctgagtccctcatctcttctctgtattactgcaagagcctcttaacagaggctcttgtcttcccttgtcctcttatggtctcttctcaacctagcagccagggtgagtcttttaaaatatcactcagatcccatcgatcctctattgagaacccttccatgagtgattttctcttcaaatagaaatttggctctaagatccacagctgacttcgtcacttctatgagtctttgtttacacaaagtcagcttctagaggaaaaatatgaattgacctatatcaagtaaagagattggactaataaaaatcttcccataaagaaagccctagacccagatggcatcattggtgaattctatcaaataatatcaatcctttgtgaaatcttctagaaaatagaggaggaataaacacttccctactcatcctacaaaaccagtgttacctgatactaaagccagacagacataataagaaaagagaactatagactattgtccatcatgaatttagataaaaaccctttaagatattagcaaactgaatccagcaacatataaaaaaagattatatgccatgaccacatgggatttttatcccaggaattcaaggttggcttaacatctgaaaatcaattactgtaatacactatattaatagagtaataaataaaactatattatcatctcaatagatgcagaaaaaaacatttcacaaaacccaacacgatgtgtagtaaaaactctcaacaaagtaggaacagatgaaaacttcctcaacctgatataggtcaccagtgaaacattttctgctaacattatactttaaaatagtgaaagattggatgctttcccctaagattggaaacaaagccagaatgtctgctctcaccatttctattcagcattgtactgtaagttctagccagtgcaataagacaaaaatgcattaggttggaaaagacaaagtaaaactatctttcttcacagacaaaatgctcctgtatgcagaaaatcttaaatttacaaataactattaggtttaaaaaatgtgtttatcagccaggcacagtggctcacacttgtaattccagcactctgggaggctgaggccggtggatcacttgaggccaggagttcgagaccagcctggccaacatggtgaaaccccatttctactaaaaatatgaaaaattagccaggcgtggtggtggatgcctgtaatcccagctactcaggaggctgaggcagaagaattgcttgaacccaggaggcagaagttgcagtgagctgagattgtgccattgcacttcagcctgggcaacaagagtgtaactccatctctttaaaaaaaaatgagtttagcaagatccaacagtcatacacaaaaattaattgtgtgtatatatagatacaccatctatatataatcttagcaatgaacaatccaaaaatgaaattaagaaaatttcattcacagtagcatcaaaaataataaaatgcttagggataaatttatcaaaggaagtacaagatgtacactgagaactagaaaacactgctgagaaaaattgaagacgtaaaaaaataaagaggcattccatgttcatggatgggaatactcaatattgttaaggtggcaattaattctaaattgatctatagctttcacgcaattcctatcaaaattccagcaaccatttttttgcagatgttgacagactagtcctaaaattcatatgaaaatgcaaaggacctaaaatagctggaaccattttgaaattcactgtgggaaaggatagtctttttaaacaaatgatgtcggaacaattggatatctgtatgcaaaaatgaatttagggccttcacaaatcactaaaacttaaaatgcaccaagattaaatataaaaactaaacttgtaaaacttatgggagaaaatacagtagtaaatctttgtgacctttgattaggcagagttcttagagacaatatcaaaaacacaatctataagaaaaaattatcaaactgaacttgattaaaattaaaagtttttgtgcttcataagacaccattaagtaaacgaaaaggcaaactacaaactgagagaaaatatttgcaagtcgtatatctggtaaaggacttgtatcctggctataaagaactcctataacatagtaagacaaatgattctatttaaaaataggcaaaatatttgaatagacattttaccaaagaagatacacaaatggataattatcacatcaaaacatgctcaacatccttattcattaggggaatgcaaattaaaaccataatggataccacttgaaacctgtaacagtgttggcaaggatgtagagaaactggaatgctcatttattgctggtgggaatggatacagccactttggaaaacagcatggcagtttcttaacaagttgagcataaactttccatattatgtagccattccactactaggaatctactcatgaaaagtgaaaacatatagccacacacagacttgtttgtgaatgttcatagcaacaattttttttttttgtttttggtatttttagtagagattggattttgccatgttggccaaactggtcttgaactcctggcctcaagtgatccacgtgtctcagcctcccagagtgctgggattacaggtgtaaaccaccacacctggccagcagcattctttataatagccccaaactggaaacaatccgactgtctgccgactggcgaatggataaacagaatgtggtatatccatataatggaatactattcagcaataaaaagaagtgaactacagatacatgctacaatacagacaaatctcaaacacatttttccaagagaaaggggctagacacacaaggccacatatgatatgattctactcataccatatatccagaaaagccaaatccaagaagcactgcattggttgcctgagactgggtgggagtgaggattgacaagggatcgttttagggtgatgaaaatgttctaatactggattgtgggggtggttgcacaactctataaatttattaaaaataattgagttgtacacttaaaatggatgaatttaatgataatgtagagtttacccaaataaagctgttaaaaaataaggggaaagaaaaaggccacttccccatgaggtctattccaacctctcaacacctcctttccctaggaaacccaacccctcacactctgctctactttttttgaatagcattgatcaccttctaatacactataaagttttcttgttatgtttttcgtctaactccctccgctacaatatggttcgcggaggtaggagtttcaagtctgttttcatcgctaatgtatattctcagggtctagaacagtacctggcatgtggaaggcacatatacagatgctgaaagatgaaatgaatgaagaattctggattaaagggctccttcatctctaaaattatctaatcaaaggtttttgagggtctttctggcatcttcttgtgtttcttagcagacctgttgcccaggccatgttggcattttgggctgaacctggacgtgagacggggaagtcccgggggaccctggctagggctcagcgttgtctggaagagtaagaggaccagctctcccttgcccatgcctcgtgctgcctctagctatttcctttgttgaccttagttgacgcatctttaaaatgagttctctccagcagcctagtgacttcgtttgtgtgcgacaaaggggaagggagcagtgggattgggggtagggcagagatagtccttcctggggggtggctgtgtggccatcagccttctcctccctttcttgcctgcaccactgaagctgctgggtgatctctcagctgctaacattgtttctgacatattttcacatgaaaacctcttcctttatataaacatttataaacacctggatcgacttgtgaaagtgtgacacattttttggaagccagttttttcgggttgtgggactcagctatttatttttgtgagatggaggcttctgggtgcctatgaacctcccccttggaaaaacctccttcacacggacagaacaatttagaggctcagagtgatggagaaagacgcggcaggtggccgcccagaggatgatactgaatgggatggcaaatgaatgctgcgggtctcggggctccccaggtccatctgaggaggaggggctgccaggaagggtttttggaagccttgggtttgctcttcgagccgactccccgattccatgagccctgggatggtggaagggttcaagcagggctcctggagttcccaggggctaggaagaaacctgtttcatagtgatgattttagggggagtcaggcagcagagagagtggagtttggaaaagaggaggggcataattgagcataaagggccagggtttcagagccagaagcgactgcattcagattctcgttctttacctttcttgtgtgtgaccttgggcaaggtaatgagcctctatgtctcagcttcctcgtccgtaaaaggggacacgggacctgcctggcagagctggtcagagggcagatgaaggcatgcgagtgggttcctcagcacagtgcctgtcatagagtggcagctcaccagcgtcacccttgcccttctctcttctctccactcgagcaactcacaagctgccctttctgtgcatagaaggtgtggctgaacttagatctcctcatccctgcctagtggggcacatgcagggtgcagctcccggagtctgggaccatcaggacctctgaatgggggctttgaagctgtgtccagtccctgtctttcctagtacctatcagaacttctcatgagtgaaagccagtctcctaggcatgagcatcttatctctgatgaaccccccagctttttgctctgacatcatgccaccgtttctcatcatttcatgggatataccttctgctcctgctggggaccctcactcacaagccctgttctgcctggactgattctcaccttgctctttcacccaggtgaactctcagtcttggaatgccctcacccctccttcatactcaatcacgtctctgccaccctccaagcttggcttcaggtggagttcctccaggaaggtagctgtgttgaacactcactgcctgaccttttcacgttctgtccaaactctgagacattattttagctggtatgtaggtcatgaggttgacattaggaagaacatatcaggttctccatcctcttttttcctttttttccccagccattctgtgtgtgttcataaatgtgacattcccatgatggacccagattttgccagcagtttgcagaatggtaaagttttgaattaaagtcaacagcttccaactatctgtcactttcctgccttgtggcatcctgccaccacagaggcaccaacatatctcagcactcaaattgggcccagcgtggtagctcacacttgtaatcccagcactttgggaggccaaggcgggggaatcacctgaggtcaggagttcaagaccagcctggccagcatggtgaaaccctgtctctactaaaaatacagaaaattagctgggcgtggtggtgcacatctgtaatcccaggagattcgcaggagaatcacttgaacctgggaggcagaggttgcagtgagccgagattgtgccactgcactccagcctggactggacaacagagcaagactccgtctcaaaaaaaaaaaaaaaaaaaaaaaaaaagaaaaaagaaaaaaagaaaaaaaagaaaacacacactgctcaaattgagaactttggatctgggctaatatttcacctggggctgaaattgtctgggcagagcctgcaacaaactgctctggggacagctggataggaaaggaacatccttaaatggttctggctctcttctctctgaatcttcccctctcttgggccagcccatgacttcactcagctccagaactggcagatttgctgccatcatctcatctctggagatgaatctatttccttcctatagaaacagcatgcaagaaaactcagcttctgcttgaatactcccagagacaggaagcttactacttaactgaactctgttagttttaattgttgagataagaaatgtcctccctgacgttgtttccttccttccttccttccttccttccttccttccttccttccttccttttttttgagataggggtctcactgttgaccagacactgcaccctttgcctcttgggtttaggcaatccacctgcctcagcctctcaaagtgctgggattacaggtgtgagccactgtgcccagctaccctggctctgtttccatcctccggagctccagagtaaatctattgtgcttctttagatatttgggagggaccctattcccctacatcttctctctagtgagctgaacctcctcatttttaaaaattgtgtacacagtatctctcttatgtcttttacaggcactgcgtccctgttagacttcagggactttgcactggccatggtgctgaccaatcacaggctgcccaggccaaggattgggtctggtgctgctggagatactgactgctcaactctctctctgctgttgctcctcttcatctactcccatctcccatggcctgagttaaatcatgacagttgtcctggtgcctccagggctagtgcacatagggaagtaaatggctgaaattgggaggagaggaacacacaagggccagtggctgggctccctggagatctgcagtgctgtgtgtgtgtgtgtgtgtgtgtgtgtgttggagcagaacagagagttgttggttgtgcctccatctctagagtctgcagggatgtcaccaggtatgccatgatgaggagtggtttcaagagctacacaggccaggcgcagtggctcacgcctgtagtcccagctacttgggaggctgaggcaagataattgcttgaacctgggaggcagaggttgcagtgagctgagatcacgccactgcactccaggttgggcgacagagggagactccatctcaaagaaaaaaaaaaaagagctatacaaagagtggaccccccaggctgcctggagaggcagtcggtcatgggtccccaaacacctctctccactggacctacaacacaggtcccctcacagcagcaagataacaaagctgtggccattcccactccaaaggcagcaatgcatctttcctctgcaggacactgaccatagctgttagtcttggctcccggctcatgggcattgcgtcttctgcttctgtggtgtcctatcctgccccgaaacagtgggggctcccttaggctctggcccctgccaatcttccaggacctctctttctctccaggcttggcctccgcgagtctgccttgggttgtgtgactttgtccctaaactccctctgaggatgacacccctccgtcaccccactggctgccggggggaaggcttccatttagtggcattttcctttctcatttcatgctgtaatggagattcattgccagttttaaatccataatttgctgtgaaacccttgttttgggcctgggctgaggtcggaacggagaagcggcgggttatttttagccctcagagggctccctgtgcagctgcagctcccctgggcttcccccagggcgggcctcagacagcgtcctgggtttgacacccaggatgcccaggaagctggagctgggacaggggtaaacacacacgtgggactggctggcctgcccctccctcagttggctctggctctgttcctcctccatttcatgagatgagggggaatcagtagagaaacagggcctcatgccgatgagtctgtgcttccattacccccctctttcctgggcctgacaaggagtgagggtcagtacttcaggcctccaagaatgtgtccatttcctaacagtgactgatcccctgaccggatgttcttgtgtctttctatcagggcgacactgatgatttggctctgaggtgtgtgtgttaagtacctgcgtgcaccagcgcatttgtccttgaggcgaagctgtccatgtgtgtatccttatgattggcacataaatggggaatcctgtcaatggccagtggccagcggggcttccagactgaggatcccagtagggcaccaggacagaggtgggctcttgctgtgcttttgcaggcttgtggggatgctgaaagagatacccaggcctgaggagcagccgtatgaggggtaagtgggtgaggggcctcctccaggcagctgccccccgcatgttataggaaggggcttagatttcacttgcagccctggagctgatgattccatgtcaaatggcagacacccgaggatcgaggtcctgacttttgcaaatctccacagtctgagctcactttttgctgagcagttgagcctgctcagcatctcccagggtcacgcttggttccagcagctgaagggtatattatccttgctctcaggaggaagggaagaggaactcagggaacaatgcctctcatgccccaaccccaaaccatgagcaaatgagagagaatcacagtcaacccgtgaagtgggtttaacacttcatctctcctgctactggctccaccatggagagggcgggccctgagagattaagcatcatcagcccctgtctcacagctggatggtggcaggactggggcaggagtgaatgcgtcccagctccccagtgagggccgtttgtcctgcttgggtctggagagtttccaatgccctggggatggtggtgacacactccagaacttcccagggctgccctgaagagcctgtctcttggtgatgggggtgcagccactggggccaggcaacagcaggaggctgaacccctaccataagcagtagaccatgagtgggctcctaagaacctccccagcttcccttgtcctggtgttgggagcaaaagatgctggggggtatgggggctggccctgggcatggtcatttgggaagctacccccagatttcagtggcgagtgggcacttggataggcagtgtcgagcttctgggcccctccagaaatcgctcatggtggcactggctggggtagggtggggctgtgcattccttgcatcaggtcttctccttcttggagaggctcctgcctgcccttctccacactcaggcagggaagggaaaagatgcgctgagtttgcctccatccctgagggatcctctcttcctccgggccttggaagtcgtttaatgcttgagtgtcctgcccccacctcatttcccaacatgagggacgaccccaggctgggggagagttttgacatccagccaggctgtgatgaggatgggagatggagtgggtaaagagacagaggccatgcctgcccatggtaacatgcagattatgggggcagggagattgtggggggcgaccttggagtgcagcaggagggcagggctggggcgacccgcacacctcaactcaatggctgcaagacctccagggagaccttctatctcatctggcccccaacagcaactactcagcgtggcattatggcattgaacccacagggtggacctcagggagctataatataacttagaggtgagagactatatgtcagcctcagatacccttcatggcccccagctctgctcactttatcacctgcccagcaggtgagctccgagttagatgggaggctaaggtggtgtcagtggccaaagggagaaagaggaggggaatctgcttctggcccaggggacatgggggtagtctgggctaccaggaagggagctgggagcgagctggtggcaggggtggggtgtgtgtagggggagcgagatgtacaatagctccgacacagctcccatgtggaacctcaggagataaggatgttttctgctcctgtcttccgtctctggctcgtttgctaccgctatttgggggtgattgcagggtaatgaatgttgcaggaaacagccacatagcacaaatgagatacggcactaagaccaggccagggcccaggcaaaacacgcttaataagcagataaggaaatcaattctgcctttcttcccaggtgtgcagcctgctgggaggggcctgcaggaatcatatcttcctgccttgcttgatacatgggaaagcttctctaggaagcaaagtctgatcccccgggatgcaggggttgcttgttggtgtctcataacattgtgcaataatagcaatgatgaaaacagttataatactagcagccaatgctgctatgccttgctgcataacaggcgctattctgagacatgttttacatatattatttcattaaatcctctcttcaaccccatgaaagcagttatgattatttccctcattttacacagaaagaaacaggcacagagtggttaaataacttgctcacggtcacaccagtggcaaaatgatacagctaggtttcaagtgcgggcaatctggcttccagaggccaggcgcttagccacattgcctctccaacacaacacaacacaacacaacacaacacaacacaacacaacacaacacaacaaaacacaattgtcatccgtgtttggggcttactatctgccagactctgttctctgtcgtcagattcagtgtaaactccccctaaattttccctaagccttgttatttcaattgccatgaggaacatttactgaacacccagtatgtgattctaggctgtgctaggcatgaaggatgaaagatgctcccaggagacccggtgggggaaacagacatgaaaacagttactctcaacatagcgtgtcgagacctgtaatcaaggtgcataaggaggctgggcgcgatggctcacgcctgtaatctcagcattttaggaggctgagttgggtggatcccttgagcccagaagttcaagacaagcattagcaacatggcaaaacccggtctctacaaaaacaaaacagaacaaaacaaaaaaacaaacaaacaaaaattagctgggtgaggtggtgcatgcctgtggtctcagctactcgggaggctgaggtgggaggatcgcttgagccagggaggtcgaggctgcagtgagccataatagtgccactgcacttcagtctggatgacagagcaagaccctgactcaaaaaaaagatgcctaaggaagtgaaaaggaccacagggggacagtcaggccatgtgggctccagagaaggcttcctggaggaggagttgtctgaggtgaatcttgacagctgaacacaagttagccaagggaagaaaggtaggaagggcactccaggaagaaacacagtgtgaatgagggcccagaggcttggtgagcggaaggagatgccagctgcttgttagtgcgggagcaggttggcggtgggtctgaggctggggacacagctgggggctggcctcggggggccttgtgtggcctggcagggagcttgggttttgttctgtggggacactttctcgcccctgaagaacccctcagactgtcacctactgatttgcctttttatgtcagggtgactatggatgggtttcttgcaaccagtttctggaagaatggtttagaagccagcaccctcgaggtctgttccagctctgccttcctttgctggcagactctgagttattcaccactgttctctggacccatctccccagaagattcatggatgggagattgggggaggctgccaacgcggtgggctgaggaggccctgcagctctgctggtagagctgtggcaaagggagcttgtggttttgaaaaacaaactagttaaggacacgtcacagattggaccttatctgttttcctctctcagtatttggggcttgacatcatttaaaaagatgccctctttatttgaattgacttagtctccctcttaaataattcatgttgatttaggaagctttatttctaacgggagccacaagacagcagagttaatattagaacgggccaggaagaagagggaaatgaggagggagactgggaaaaatgcccctcttaataattaatctgatgccaacatcccctcctcccacttctgatccccccatcctgctctactttttcctttccgtagcatttattaccacctcacatcctgtacagcaatgcaatttatggtttaatccgtgcatcacttatcgaccgccttctctctgccagaatgcaagctccaccagggcaaggatggttttctctttcgtttcctgatgaatcccacgtgtctagactagtgcttggcatataacaggtgctcagtaaacatttgttgatcaaatccttggtaccatttcctccctgccctggatgtcccaacaccttgcttcccaagtttccaggaagttgaagagatcaagtgtaatgccacccttacaactctgaccctgggacagtttcaatatttttcaaccctgggattcctgtaggtggaagaaggagcagtctgcatgtatatgtgtacacaactttaaaatacaggcggggtggctcacgcttgtaatcccagcactttgggaggccaagatgggtggatcacttgaggtcaagtgttcgagaccagcctgggcagcatggctaaaaatacaaaaattagccaggcgtggtggcacgtgcctgtaatcccagctactcaggaggctggagcaggaggacccagaaggcggaggttgcggtgagctgagatcgtgcctctgctctccagcctgggcgacagagccaggctccatctcaaaaaacaaaaaacaaaccaaaaaagtgtatgacacttcactgttagagattgagagagagagagagaaagagagagagagagagagagagagagagagagagacagagtgtttaatgtttacaacaattctatgacattggtatttttaaccctctattttatagatgaagaaccagaaacgtcattcattcattcattcacgctggttatagaggcttgagccaaagaggcccagttccagccttaaggaccttgcccaaggtcacccagttagtgagcagcaagagcatattctacttcctggcccagggctcttcctaccccatgacagctctctctgcacatgtgcatgggggtcctctgaagcccaaccaaactgagtcttcggagagggctaggtctatgtggaagctggctacagaggggtggttgggggggatcctttgcagggaggaccagggtttgaggtccacagccaaggccaggaccccagggctgaacaggacttggagaggtcctatctcccagcctcaaagtgggatgctgtttaagccaccctaatcagttttcttctaagcctcggtcactgcgccaatcttggttccagggagggatggcccaatttcctaaaatagttggtacagcatgttggactccttacagtggaagtcatggccttttgggagcgagacagttctcagcgatcatcttatttatcaccacctctcattttacagatgaggaaactgagacccaggttgagaaacagggccactgtcacacagctggacactggtaaaaccaagaccactgcctctaagtctaatgctgtttccgtgacgctgtgattctccagatgttctgcaggtgaaaagacgcctgtcttgaccctgggctgagtcaagccatagtccttggcagctggctgggccacagagggcacgcagcctgaccactgattgacctgacctaaaatccccagtctttgcctctctcagctttgcaaactcaggccttcccccgtctttccctcctcatttcctggctccctccttctgcctcccgaggtacaaatgctcagctccgaagttgctccttgcctgattgcatctgagagctggaaacacaacgctaattaatgtgtctgtgactctaggcttggctgccaggccgagtccccatgccttccctagggcccagcggctctgcgagctggccctctggcttcatctgagcacgctgccggcagatgcatattttaacaatgcacatctgttggctatataatctctcgtatttgccctcctcacttggtacttcgatggaagacccccgggggcctccctctgttctagccaaagtgtttgctttgcaattttgccggaataccatctgattctgctttcgcgtcttccgcaggttctaatcaggctcttactttatttaattaaaaatctatctcaggcaaatacagactaaattaggaagctctctcattcctggaacacagggaaggcagccccccttggggaactggctgggacattttcccgggctgagatgtcacagcaaagcagatggggtcttggtagggaaggcggctgggccaaggagcagaaatacctctctcccatctgtgggaacagccactctctccattccccttccccagaccaggggtccccttccagctggctgggtcagctgctgcactgggggcctccttgcagagcagtaggtggggtgctataccccaggacactcagccaggcggagccctgcaagaccagctgggttggggacctgggagtgtcccagggagtcagcgaggactgcaggcagagtgctgggaagcactgtcttgcctggggttttagtttgctcaggatgaatggttttggtggagctgcctgaaaggctgatggacaagatgctggctgaggctccctttctggctctcaggaatttcacggaggggaccctgctggggatcatggaaacttcctctgccctccttccgctgatctccagacttgaataaaacatctcccccatacaaacccagctctgtgcccagagggcggtgtcaggccatgccaccggagaggaagggggagcgaatgccttttagacatgacctaagacaaaatcgggtctgttcaggttggatcctgaggccctgctctgagaagcctggcccctcaccagccagacagatgagatgctgctggcatctgggaacaggagactaggcaaagagcttggagctgaaaaatctggagttgattttgaaggttaattaagctgtgtcacctcctgtgagtgcctttgcctctctgagtttccattctctcatctgtaaaacattcgaaataatctggacttttaatacgttggacttttttacgtaacgtagagttgagaggaaaggaagtgtaatgatcatgtcaggactggggaagtcaatacagccttaaggatgagatgtggctccacctatttttggttcctgtgaagtcagaggagtggacaatgctcaggttcctgtggttccagcatcctctggcccctctagaaggtgtatgagtcggtagaggcagattcttctgaggatggaggggctgagccatctctgaagatgaggagcctacaacttagcaaatctgttctggcattttgcaatcctcaaaatcagaaacaatatgaggccctaattcctcctcctctcctcccacaacccccacaccacatggcagactcattctcattttagtcaccgtcttgggagaaatgagaacggcgctgctgcctttaataccccaattactcctcggaaggcccgcttcccggccatggaatcccaacttatttacccccgctggaacaggtttattttctcattcctttcatcgcaggcctggggagactcaaaggttgcaggaggtttctgaggctggccccaagtccctcccccgcatctcaagaagtcaagctccgagcttggtaagtggtcctccggggcctgtctgctgcactgcttggaataatctgccctggtgtctttggccatgtagatctgaagataacctgacatgcttttaaatatttcatctctgagcagctgtgtgctttagctgccaggagaggaggcagcaccccagctgctgaccctgttgtcgaaccttcacaacagctgctaaggggtgggcctgggctttcccacttccctcctgcacgcgtgcctggcacagactcacgtgtaagggggcagcgaggtggggcaggtagccctggagccctggccaggagcccatgggccaagctctttgcatctgtgggccttagtatctcatctggggtaacagtccctgtcccaccgagcagcgtcaggaacagcggaggtcatgtgcctgaaagagcctagagagctacggtgaactgcttggcaaatgtgagctctcatgacttatgtgcaaggcctggttctcagcagccttgatcctcggtaacatttggccagaggagggagactcccgggactgaactctaaatcagaactaggcggtttaagaggtcaccgagcccattcccctgtcttcaggcaagatgatccaggaacgctgggctcctgggaacataagatgaagaaagatcaaggggaaaagtatgatttggaataaggacctgaaatgaattttcctaggagggacctgtcagccaggattcccagggagcaatgaggggtggagaagtcacgggggtcactggtgtccacatggatactagaatcatggggagaatcgggctgattctacagagaaggtggaaagatagggctttgttagcaccggagtgggggtcagttcagaaagaagggacccacagcctgtgccacattcttcctggcacggagcctagcctagataacgtgtgcagagcatgctttctgatggaataaataagcatgtaggagccctcattagctgcctaaggcaccatcaaacacgccggggttggactgagtccgctggcattggctgtctggtttactagggaaagagccttcgcttgtcccgtttgggtgggaaggtgggcatggatattgtggaagcagcagtgtctggagccctgtgggatgatccccagaggggagtctccccatgtctgaccaaaaaaataccctcttggagctgagcccttggtgcttcacgcagtgtcccagccccgtgtgcagatggttcttacccaggactgtgaggcgtgcggggcgggagcggatggcggcctggatggcctggcactcgtacaccgcatcgtcttgcagctctgccctcaggatcttcaggtggtgctcccctgacaggtggttccctaccaccaggtactgtgggtaacctgtggagacaacaggcaggtcagggagctggggtggggtggaggggacacccatgacaaagaggcacagaatggaggacccaagcaggggccattctacaaggctggcagagcgggtgattgctcagggctctgatctcagtgcaaggagcacaaatgcaagagctttcccaaggcattgaaggtgttggttctctctctctctctctgtatgtgtgtgtgtgtgtgtgtgtgtgtgtgtgtgtgtgtgtgtgtgtgtgtgtgtgtataagggcatttggtctgtttgttagtttttgagacagggtcttgctctgtcactcagattggagtgtagtggcaggatcatagctcactgcaggctccacttcccagactcaaacgatcctcccacctcagcctcccaagtagctgggactacagacatgcaccaccacgtcggctaatttttttatcttttgtagagatgggatctcactatgtcaccctgactggtcttgaactcctggacttaggcggttctccctcctcaacctcccaaagttctgggattataggcatgagccaccatgcccggccatgtaagggtcttgttggtttcaagtttaggaaaatcggaggagccactgttagaaaggaaagagggagaagagatggaaatgctaagcgtggacagacaccgctggcttattattctggaaagtggtgtgctcagcactgtggtctaccaagcagacatgcattttgataagatagagaggagagagagagagacagacagacagagagacccaggctgagaattacagagagaagacagtcagagagagaaggaaggaaaaagagaaatgtttggaaaaggatcaagagtgactttgcaaaaattttgtttcaggatggacaggaagtagaaatctaggcccgcccttccagtgtctaggaaccttgggtcactttgagtcacagtggaccctgtctagtcattcctcctgtcccgccagaagccccaggtcctggtgacgcacttatgaagtgctcaggacgcttaagaattgggggccccttgtaccatgggcaatgaataatagataaataaaagtttgagaatataaatcattaatcagcgttcctgctgctgtgtagggttgaatataaatgccaactgaagttgtggctggccaccttaggcagatcctctctttcctgggtctcgggccctacacctccctatttctctttccatccatctcctcactgaggtctgccctcccccgagtccctcagtgtgtggatttacaactggactccaatccccgctgtctttcatctctgtcccggttcccttctctcctcagaggctgccctcggcttccactcccctctggcagccccaggctgctcctccttttgaaggaccctcaccacacagggagtgttctcagacgggtgctgtaggaggatgagacgggacacattcagccttttaaagagaagatgagggcttaagcaagtgagagagacagaacaaagacaggcagggagacctgcaagagctcgcctcaagtatttcaaagaatctctcagtgtgggttgggcatgttcctgagctcccaagggcagcaccagcaccaacaggcagaattcacatggggaggttctttagaatattctcaactgtttgaggtatccaacaaggatctgggatgccagagagtgtagtgaggtccccatcactggctgtattcaagcagaggttggatgatcgcctctcagggatgttgcagaggtgatttctacaccgggtgaaagatcagactagaggagcttgaaggcccctctcaccaccataagtgaaggttcttctggaggtggggcaggcctccctgggggtgggctgtacaacgggccaccagcacttgttcctggtcaggcgaggtagctgtgatgatcctctgccagccttcctggcatgctctggagtgcttcctgtgcagctgggcccttcagactcatgtcttcatggctaccatcctcatcatgcaataaaatggccctgtcctccccagctgtgcaggcctggccagaaaagctcacaaggccatcagctgcacccctgagagcactgcctctcctcctgcccacacttcccgccttctgctgggctttgggaatgagcccaggtaagttaagctgtctccccccagggccaggagaggggctggaaatgggttctagcccaatcctctccctgctgccgctgccttccttgtagctggctggctacccccagcccctccagcccagcctctggatcccactatcctgtgattagtccctggtctcctgcaggcatcttggctggagcttctgtttctgttgtcttgcaagctatcagcagcaggattttgctctcacgagctgctgaaaacatcagtgatgggtttgtttgtatttgcctaattaggcagtgagctgtgatgctatcccaaggactggcagcatctttgaaaatcagactcagaagcatggattctgagaaagttctagctccttccacattatcattactctctcttgctactcccaaaggaggcaaaattacttagagtctgggttctatagtcgaattgcctgggttccaatgccagctggatcacttcctagctctgctgtcttgggtgagttactttaacttctttgtgcctcatagactacttactatgtgccagtccccattttatggggacaataccagtacctcataaggttatggtgaaggttaaataggataatctatgtaaagtgcctggcacattgtaagtagtctataaatgccaatttaaatgaagagaaaggtatgtcataaggtcaggtggccaaagaggtctttatctttagaagggagagaagacagagtatctggaccctttggggttaacaggcaggtctcatgtgctgggattggttatatagttgagtcaatttctttctcagttgtgactttgtttacctgtcaaacaaaggggaaaatccttcttttctccctccggatcgctgtagatttatgagataatgtctgcgaagtacctgagcttcttagaagaaaaatgtgctatcaatatgaagaagtgcatttataaatcattttctttgactggttattccagctttggtgactagaaaaacatttaggtcttcaaggagcgtatcatttctgggagattcgggggggccacatgggtacagtaggagaggacagagatgtagcaggctgaaatcccacaaccctgggcctcagtttccctgtaggagagctttcgcggtgttaagggctctacaagtacttgctgaattgagttgagggctgtcctgcctgtttccacatcaggcaagcgagcagagttaattgagcatgtaagtatctatcatgattgccatgatgctatttttgggacaagtgacaaaatacagggcaagtattttatcaggagtttgaggtcattggctctgtatggagaggcaaaccgagtcaagctggagaggacacaggccccagtttgtcagaggccattgttctgcagccctaagcaggtaccagtcctggatcccagaaagccattcatggcactggatgctagagggtcagttatccatgctgagatgaccaccgtatgcactatccctgctgacctgagcctccttttggccactgacccagcaagaccccagtccctgacggaagttggaaacccactgaccgggaccccagacagcctccttaactagcggcagcgctcatcccagctcggagccattcagtgcatgaactattctagtttgggaaggttgtatcattcctggagtttctctagggtaaaggcgttcggagtctctgaaattggctggttcccataacagttaaactttatggcagcacagtatattttggagatgtttttgtgtattttttccatgctcagctgggctgcagcgttcaaacctcgtgcctgctattgaccattgctataatgtttcaatatacatttttggcaagacataactcacatttaaaaatattaatttcccaaccatcatgttcctgagtgcacttcgatttttattttcctgcagctgtacaccatgcgagaggcaaagttacttctcagctgaataatatttttctctcctcctccacccttagctattcccaaatcacaggggaatgacacccagaggtccctgcttgtgaattttactgtgtacgccaagcctagcaaacaaccactgcctacctgtaggacagaataatgatagctgaagggtgtgtgaccagggggatgagccattctttttttttctccagggaagaggatggattggaaaagcgtctgtatggtcttatgggatcactattcacaatagttaacaaatgatctgttgtcagcactggccagtgagttcacgtgtcagccatcaacaaccatgggaactctcactgcctgtcccagggtagctttgctgaataccagcctgcccaagccgaacatagttggaaatttatttttaatacttcctgtcttttcttcccatctcatgatggctcctaagatcaactaggtgtctttgtgagttttcagtttacttggttccctttaatgggtgagaagcctggaagaaccaggttgtgacttgtatttccttaataattgtgccttaataaatgggggatacatcttgggccaagacacaggaacacttgatttctggaaactggaatttacatgaatcatgtttgactttggagtaggtgcttgagggcaatgtcgagttaggttaggacccaccgctagaaggagggtttgcttatggttcattatgcacatcaggggccctcagagtctagggatgctgggtgcagtgcttgcctagcctgactctgcctgaggagttgcagtgaaagctagagattcgatactcagacacctgtgaagatgggtgctccctaggaaggtggatgggtgagtaaggaagtgatggccccaggcccaccccaggaggtctggaggtactcacttgagaggtccctgcccacacccagagccaagccgtccttgatccacagaacgaagccatcgtattcggggatggcgcaaagtagcgtcactggctgtcccgacaccaccacctggtcctggggctgctggctgaaggaatagacttggcctgggaaggagacaaacacaatggtcagttatctgccggctacaggggcgagaaggctcccctccagctatggaagcagagcagggctggcgcaggagactgagcctcctgaagcacctggctttcctgctgagggtctggtagagcttcctaactggtctcagccccagctctattccctcctatgggggcctggctcccagctccagcccctctgcccatcagtccctaacacatggactggtctagccacaccccagctccctatgggccatctccctccacctttgggacgtgccacttcccatgcattggtgagctcctacttaatgccatgtgctgggcatgcagtcccacaccagggcagaaacaggagagagagagagagacctctagctagaaacattctgtggtggctgtgtgttaagaagggggtcgatggagagtggtgcggctttggttaaacctgagaattcaggaaatcattttgttgtttcagtggctcctggggtgggctgagggccaagttcagaggggtgggtggtggtgcagtatggcaggaggtgtgctgaggaggcgtgccatcctaccgtgtcctccctgtccctttcttttctgcagcagaccttactccagcctcacaatcacttgggaaaaaatcattatggacaccatgcctcctcaaaacgagatggccagaatcatcgaagagagtcagttgacattattttattaaacaaacccatccacaatgcttacaagatgccatgctctgttttgaggctttaaaatattagttcattaatattttcatcgtcataacaacctaaaaatagtaggcactatttttatccccattttccagatgggaaaatgaggcacagggaggtgaaaaatagtaatgggagctgtgcttgtgaattgctcaccaagtacggcgcatgccctgactctagttatcaccgtggcaacactcgaatggggcattgtcaaccccatttgacaggactttgggaaacggaggctcagggttaactgaattgcccagggaactgtctagtgggagttggggtgggtggtgcggtgaatccaagtctttctggctctgaagaccatgctctcccctactgagctatgctgtgtgcagatccccaagcctggccttggagggagttgctgatgaagaggtgtgatgtgatctgtgtctcctgggagtccacagttgagtggacaatggaacattgacattcgctgagcatctggcccacagtacaaccagtacttcatacaacccctcctgtaatccacttaattatacttcagggcagaaaaagccccactttacaacaaagaaaccaggatcagagaggcacagtaacctgcccaaggtcacgcagctaatgagtgttagagcaggggtttgagcaggggcccatctgcattccaagccctccctttttcctacctcctgctctacagacccagacctaaccgaggcaaaactggacctggcgctccagctgctgatgctgtggcctctcctccccaacccgggagagtcaggggcagccacagacgtcctggacactggctgctgcccatcttggggacaaaaagccccaggcttgggccacacctaggactgagctctcagcaacagatgaccccaagagggagacacttggtgtgtatcaacccaggggagcttggatggcagcagagcttggggtggaggctccccagaaggaggggtgcagattcacagtggagagctggggacaggcaggaaggtggccgagttcacaacctgacaagatcttggcagggtctccgaggagtctcattaaaaatcaaattggccttgaattgtgggagtaacactttttattctgatttgagctttacaaattagatttcataggacattttaatcagctatgtatggtaggttttttttttcctctctgtctcttcaagttctctgttgtaattagactgtttctggcaccaaaacagggtagaaaaggagggaagagatgagagaggagaaggggagaggagggagggactggagagagagcaaaggagtgaagtgaggacgtgggagagaagaggagagggagaggaagaggaggaagcaggggaggagggtgaggggcagcatggagagggagggggtgggtggaaaggactccttctctggctccttttactctaatgatgatttcacagctcatccttttatctcaaaatctttcttacaagaaggacagagtcaaggcagctgcagtaactgccaaagattgtgctatcagagagaattatcaggttgtcaggtggacgtggagggggttataatgagagccccttaaatgaagcagtgcccgagccctctgagatgtccattattaggaagcacccacagtgggtaaccgtcccggtctctccccgtcctgtgtcctcttggaggaaggcgcgggaggtactgggtgagggcccccggggaagtggggtgcaagaagcatccgagggccaagggtaagttgtggaccggctggagcccccagggagaggagggggctatcaccatggaaaccaggctctggaggaaggcaacgctgggaagggggatcagttgaagcaggccatggaggtggactctgagtggccacagacccttttggtgggtgtctcagagccaggggtggcagcaggcacaagatgcctggaataagacctggggtctgtaggaaaggagcctgatgggatggggctgagcgggagagggccttttgagggggagcatctcccgatgccatctgagcaggcttggaggtgtaggatcccacaggttgcagtgagccaagatcgccccactgcactacagactaggtgacagagtgagactcggtctcaaaaaaaaaaaaaaaagaccttcctagagcctctcgcattctgtctgcttgatccacttggcttttctatggaaagactgtttctggggaagatgagtacacaggaaaaatccacccaaaggacatgatttacaaattattatttttggggatgggagacagtactctaattgacaatgtcccttttcagtccaattttaatttttgcacattacatttgagtcactataattacttttctcttttaaaccaatgagttttttttttttttttcaaatgaatcttaaactgttactgagtatctagagtggataaaagttgaggtgctttggatgaaggtggagatggagggatggaacccacttttttttttcatccatctgacagaccttagggcctctcctttgggctcaagagcccctcagagcacagcttttgagccatggatgtaagttattgccagaagaatgctcctcacccacccactctttcttttcttttgagactgagtctcactctgtcgcccaggctggagttcagtggggcaatcttggctcactgcaacctttgcctcccggttcaagtgattctcctgcctcagcctcctgagcagctgggattacaggtatgcaccagcatgtccggctgattttcatatttttaatagagacagggtttcaccatgttggccaggctggtcttgaactcttgacctcaagtgatcctcccacctcagcctcctgaagtgctgggattacaggcatgagccaccatgcctggcctctacttgctttattttccccattttcttttctactccaaagaagtgaaatgcaagtgagcccaaggtcattttctgcagcctcctggatagtgccttaagtagacagtgagctcctgagaacctgtttcttccacacacacactgaccggaccctgctgtgaggcaggcactgtgctgtctggtgaggagcaggggaacaggcctggccacccctccaggagctcgcagctgtgccccctccccatcacacctgggcgtctcagatggagcacagagtaggtgcctcacaggctcaggtcctgctctcagtggagatgtgacacacccagcaccttccaccggcccagggtttccatcttctccgcttcgcattttccctgatgatgttcccctggtgtgaagccttggcggccggtgcaatctccccttcccatactttatttttatttttcttttttttttgagacggagtctgactttgttgcccaggctggagtgcagtggtgcgatctccgctcattgcaacctttgcctcccgggttcaagcgattcttctgcctcagcctcttgagtagctgggattacaggcactcaccaccatgtctggtaatttttgtatttttagtagagacagggtttcaccatattggccaggctggtctcgaactcctgacctcatgatccacctgcctcgacctcccaaagtgttgggattacgagcgtgagccaccatgcccggccccatgctttgttttgagtctgtcaccatcactgagcctagcccagcaggctgtacatctctcagacttcccctttcctctctattcccactgctagcacccaagttcaagctctcgttgcctcaacctgggctcttgccacagactctgaatgttctctttgcctgatccattaatgtgctgaacctggattttccgtcttaattcaccacttgcttcagggttcccctcttttaaggggtgggacctctcatggctctccactctctgcgggacaacgcccaacttcccatgctggattctaatctccaaaatccagctccttttcttcctgggagctccacagcacccccgtgctggctagtcactaaggtcacctgcctcgagttctcctcgatgtttcattgtcctgggatgcactgcatccccccacccaaggctcccccacccaaggccccccctaagcaaccccacctatcattgaaggcccagttctctccccaggcagctcctgtgacccagatggaatcttcttttttctcgtcttctctctatattctcatcttgcctctttttcatcaatttctccaaacctttattgagcacctactatatgtcagatgctgatgaaacagaaataaggaagaaacagtgtacacttcttgagggcaggggccacagctatcttttctgtcttgtgttcccagctgtgggtgagcaccggttacacgtctgtcacatgtgcctttgtacttagagtttgcctgctctggttggtctgctgagatcggtggtcactacaggaaaattgcttttgcattatgaactactaacccggcagatactgttcagagcacaccacacaggagaaaggtgagaaatcacagggtgggctggagtctctaggaatcaggcttgacaggagaaaaaaataactgctgttcatggaagatttacttgatgccacatctttggctgtatacgttgtttctggcatgcagattagctgtaattaaccacattttatagatgaaccaaggctcacagaaatgcagggacttgcacaagttcacttgattagctcaggtgtcactcaaaccccaatggtctgggtacagccctattttctcaccactatccgatgtaggttgttgaatcaagggtctcaagcccagattttgattcttaagcaagtactcactccaccaacaaggcagcctactcagattatttatctatttttatatttatttatttatttattttgagacggagtcttgctcttgtcgcccaggatggagtgcaatggtgtgttctcggctcactgcaacctccccctcctgggttcaagggattctcctgcctctgcctcctgagtagctgagattacaggcacctgccaccatgcctggctaatttttgtatttttagtagagacggggtttcaccatgttggccagactggtgtcgaactcctgacctcaagtgatctgcccacctcggcttcccaaagtgctaggattataagcgtgagccactacacctggcccagatgatctaaagggaggtagaagatctttagaatgaaaagtgatttcttggtttttccctcagtttctgtgtgtaggctcctcttcacctattggtcagtaacactgaaacggttgagggtaaagtttagtactggccaccataggaagattaaaagaaaggaggtgtactagttaccattacttataattattacttaaaatggctatttaatataattatattataatatagcttataattatgtatcataaatatttttattgctataaaattagtaattgctaacttttctattttttaactttttgtagggacagggtcttgctatgttgcccaggctggtctcaaactcctggcctgaagcaatcctcgtgcctcagccttccaaagtgctgagattacaggtgtgagctaccatgcccagctagtaataggtaacttttacagaatgtcaagcatataataaaagctttacctggattattttattgactcactaaagagtcctatgagataggtaccgtatcacacctacgtgaagatgaggttgtctggggcccacagcactggcagtgagaagggatatgagcccagcagtctggttccagagcagcctctttgcgtccttatttggacttcgcccactgtgcctctagtcctcgcccccaggaactcatagaacccaccttagacctccctctcccactgcccttggccagtactgaaaagtctcaaggaaactcaggaagaataatgtacactagctcacttcatcagttctgtgtataatgtcctcatgaacacagttctctgggtggatcagagttgaccagctatccaagagtgactgaagcctatgttcaccttctttagctccctgagaaggtgagcgcagacctgcaggtcctccagtcacccttgaccctcacaaccacatcactcactccaaagaacccctctctcccttcaccatttggactggacaagccccttgggatgaaggcagatagtgcagtggtaatgaatggggctcaggaatcagactgacctgggtttgaatcctggcacttccatgaacttgctgagcctccattttcctatctgtgaaatggggacaataataccaccaccttgtggagatagagaggatgcatctgggccacttgactccggggctggctcacaacaaatgctcaggggaaaccgaccttcttctctcaaagccaccctctgtcctgaacaccaggccgcaggctgagctccatagggctgggcgacgggaagcgtgacctggaatggcaggtggctctctattggtgtgaaagggggaggcaagggtggacttttaattactatccaatgacttattgaagagacagttttcactaaagacaaggatgtactctctttgcaggaggacctcagtgtagcatccatgggttctcaggtgggtctcaaggctggtgtttgtggtaggtgagctcaggtgttggaagccttggccagctgctgtgagccatgccctgtgggggagaagaggtgggagaatgttcccccagggctgcaagggggctactggggtggaaggggtagggggcgtctcccgggccaatgagggctggcttggctccgcatctgactggcgctgaactagcttccgttagtagaaaaaggctgcgtgtgcatgaacctgcctgggcatggcagaggagcaggcctgggaaacacagcggtctctctcccacattcgcttggttaggtggctgcagaagcaccttcctgctcgccgcctggaaggtaggtcatgttcctgaaagcgggaggctctgcggggcagggtcccagggttctgagacaaagccctttgtctctgagtgagagtccctgtctgggatgcttgcccccagcctgtgcgtctcccctgcacacccaggctgttgtgacctgcaggggccgagagagcactgcgccatctgtcccgggggccctttagaccactgggtaaggcagctgcttttccctttgaggagagtggcagaatcagaggagagcctgggtctgccaccccctcgtgccaagttctctgccctacctgagaaggtagaagcttcaggagtgggagcaggaggtcgaggtgctgagcaggcagggccttttgcagccttgtctccaaattgcaggaagcagtggctgtttctggctgggaacaataaaggggaggggggcttggatgaaccctgtcctgatgggccacgtggcgtccctgagtcaggacagctggcactgttgccagtgctggtgagtggctggtgggaggaagtgtggaggtggcagcagcagtgacaggtgtggcctggcctagggaggtgggcaggaggtggagcatttggtggccttttgggggctctggttatggggcagagctgggagcaggcagatggcatcctcagatcagtggtggggctggatgtcttccccagttgtttccccaccctcctccatcgggactcctcctgactgctcttcccaaaagccccctctagatttccctcctgcgcttactcctgcctcctgtcagcccacccggcttccaacctggatgcagcgccctcatcttaatctcttttctgggactcgcagcacacattatcacggaatgaaccatcaccatctggctcccaaagtccccaccaacttccagtgaaacattgaaatgcagaagaccccatgtttctctatgacttgcacacctgtggccccattctgaggttgcccctcaatccctaattatttcctgagggggaagagtcattttgccatggaaggcgcagattacaagggccacgtcactcggtgtgatggtcttagggcagcactgcagggtgctgggtcgggtgtgtgtgtgtgtgtgtgcacgtgggtgtgtttgtcagattaactgaattggcctcaaccccaccttttctccagccagacatttgctgcttctattccttatcaagcacttaagattttggttgagggctgggcccggtggctcacgcctgtaatcccagcactttgggaagctgaggcgggtggatcacctgaggtcaggggttcgagaccagcctgaccaacatggtgaaaccccgtctctactaaaaatacaaaaattagcgggacatggtggtgcgtgcctgtaatcccagctactcaggaggctgagccaggagaatccatagaacctgggaggcggaggttgcagtgagccaagatcgcaccattgcactccagcctaggggacagagtgagactccatcacaaaaaaaaagattttggttgaatgaatttttctaggagaatccatagaacctgggaggcggaggttgcagtgagccaagatcgcaccattgcactccagcctaggggacagagtgagactccatctcaaaaaaaaagatcttggttgaatgaatttttcttagttttacagaatgttggaaagcataggccctggcagggccatcttggggaactttggaaggaacagtgatctggttcgtctttggggtccaaaggccttggtactatggtgtgtgtgtctgtgtgtgtgtgtgtgtgtatcggataggaaggtggcccagtatcctggtgcccatagaggctgggatctgactcagaggagccgttgcttactcctccctgccacccacaactgccaaccctaaatcttctagggatgcattctggaactccactgtcccaagtctattgctaccccataggcacatgtctctgcactgtggttccacagtggtggtgagaggcacagatctacagggcagcatggactagtacaaagagtgtgggatttgggatggttgtgtaacaggggagataaagctttgatgcagactctgccctggagcctgatgtgggatcgggggtgctgagtatcccctcatggccctgggcaatgctttttttttttttttttttttttttgagtctcgttctgtcgcccaggctaaagtgcagtggtgcgatctcggcttcagcgcaacctccgcctcttggattcaagtgattttcctgctttagcctccaaagtagccgagactacaggcatgtgccactatgcctggctaatttttgtatttttagtagagacagggtttcaccaagttgaccaggccagtctcgaactcctgacctcaagtgatcttcccactctcagcatcccaaaaggttgggattacaggcatgagccattgcacccaacccctgtgcagttctctttccatccatgcttggaggcggctcagaggcaggcaggaggtggctcaagggtgggctcaatccctgcctcccctttctccactggttatttggcctggcctttgttccagcagcagattgaggggacatgaccactccccttaggattaaacccagtcagacctggacaggaagtgagggtcactaatataaggatggaaatgcttgtccttgcttctaaggagcctggtgctgacacatgcacacacccgcctgcatgcctgtgagtgtgggcagcccagctgaaaccctgcctgcacccctcaactctcaggacattctgtgaaactcgctgagagtcttggatggtcacatttgaccacaggttactggattacaagggataaagtggtctcatagagaagtcatataaagcttttcaggggtttaagagaatcttgcttcaagcaagggagttgtggggaggaagcagagaaggcatcctggaggaggaatcataatatggggaaagtaatggaggagaaatgtcattctggggtaggaaaaaaaatataagcaaaaacatgagtgatgggtcaccctctgtcacctgcctggagtacctaaccgatgggtcacctgtcggagcctgggtcctggacagtaggaagaacacagggtcagtcagccctaggaaggaactctggccctgtacctagcagtgtgatctgaggccagtgactcaccctttctgagcttcagtttccctatctgaaaaatggggatgacacgcctccctggcaaagctgctgtgagcatgagaggttttatatgtaaatgatcttggtagacaggtgtttcacaaagggtcattcttactttcgtcactatccacaagtctttcctgagcttgggactgttaaaacaggagccagaggagcacctgtcttgcggagtcccagagctgagaacggaggctttgcaaatctgaagttgcacccattagaatgctgcatgggtggtgcaggagacagtgggtgagccctcccattggctctgcctctttcttgagcttgggactgttaaaacaggggccagagcagcacctgtcttgcagagtcccaaggctgagaatggaggctttgcaaatttgaagttgcacccattagaaacctgcatgggtggtgcgggagacagtgggtgagccctcccattggctttgcctcttctgctcatccgggttggcttcacagcctcctggagtgttgtgtcagccatgcaaaaagggctcaaatgtcaccatctgccttttattagtgaccaattggagaaggcttaagaatacttatactggggttatttattgccggctttctcccagcctggagcttgtaaattgcctcttatgagattaagggaagctgcccctccagagaagcaagcaaataggaagaagggaaggagagaagaagtcagctcagtggctcctggtgacatcagaacaatatcgggtagggtgggaaagacaagggcagcgtgactcagttcatacctcgaaacccaagtcttgaattctgctgtgttcctgctgctcagcacagggccagcatctaacacaggaggatcagctttgagaaatttccagaatgcccagttggtgacctgctcggggaacaggattgggggtgatagagtatgttctgacccactgactgacggataaaaatggatttttatggaggttctagggggtttcagtcactgtttcagctctcaggatgccatggtgcctcaggcatgagcaggagccacctcagcaatctccaagtccccaggttgggtgtggggtgtgcaggaggggctgatatgtcttccgctgagtaggctctggagctgcggggaggcaaatatgtgcagaagaaactagaataaaaagctctacaccataagcgtcagagtgaggcacaaagtcccaaagaaggagtcacagaagggttggcttctgaaatggccaggatgaagacaaggtgggaatgttccctggaatggggaacagcttacgtcaagtgtggagaacagatgtgttcatggaataaaagcagcagtgccacatggtctaggcttgatctctgaccctgccattatggctgtgggtccctgggcaaattgcttagtccctctgagcctcagtttccccattggtttagcaatcaatacttgttgagttgtttgtgagaatgaaataggtcattctctgtgatgtgcacagagccctgcctgccttccataatggcagctggcagtatcattacaagcctagcaggctgggtgcacggagcatgtgtgtgcagactctcttagtacagcgcaaatctagaaagtcctggtgggtcagaccgtgtgggcccttgaacgtgtgccaagaagtttgtacttcatgagaagtcatcaaaggtttttgacccacatgctcagatctgagttttagaaatatcacggtgatgacagggaggaggatgaatgaaggaggataatctgaagacagggagactgatcagcaaggttttgctgtcatgaggactcaggctaacgctgcatcaatggaaagaagaaatggatttaggagccatttgggggtagaactgatagtacttgaccagggatgaggaagatgaaagtgtgaatggatgatggaggagccatttgctgctcaggaggagaagcgcgcttgaggtgaggcagtgagttcagttttaaatgtgttgatggagaggggtccagaatcccccaggtgatgctgtcccagatgtagttgggtcaatggttctggagctgggaaggaggtgtgaagaactcacactgactgagcactacctatgggtcaggcagtaggagaagtattttcaggtgtcctctcacttggtgttgacctgataattcaactccaaatatggaaagttatagatgttgttgtgactatctaagagggacaaggttactccagtctgggagtgttgggagtagctgccttgggtgaaacatctaaatcttgttgaggtttgcacaggttttgaaccatatcgggatggcaagagatcatctaacctaatcttctccctttagactgggattggaaatataaacagagaagccagaagaaccaggcaggggtagaagacagggccttttctctattgtctgtttctccttgatttctactgggagagagacaaagaaacactttccatcccagcatcgccacctgcagccattggtagcttgattctgatacacacgtaaggagaagcttgccagtctcatgaacattacagaaattgcactagaattttacttggacttacaaaaaagaggctgactgctcttcccagggctggatgagggggtggaaagtctgagggcacattcccctatgcttgttcctcacccgggctgagccagtgtgggcagcctgtgattctcccagcctcgcacttctctcccaggacacaaaatccaccaaggttgtcctggacagtgtgggtctttaacgaagagcaatcgggctggccgaggcagggtgagtccaaagtcactataaatcctttgcctactgatgatcaggctcgcggcccctgccaaagcctgcactgtactcattagtggcagggagagggattcttccatcgatccagccaaggcctggatgccacgaagacactgataagtgctgctggaaatatgggctcttcagtgcccatggcagagcccatccatccctgcccgaggtcacctggaggtctaaatgagacaggacgggcatagcagagtgggtttatggtgggggagtggagatgggagatgctcgacagcgcatgaagcagagaccctggctgtggtctcaggcctgttgctggccagccatgggaccctggctaagccccctttcttctctgagtctcaggctcttgtgtcttctgactggaatgtgccctcactgagccggcaccttgggatgtgttggagcagcatggaaggaagagagtggcactaaggggcagggatggaactatgccattagctcaagagggagctgcaggctcggctatgggcaggctcggctacagcagacagagtgcccatcaacccctctcagagggcgtcagcgtgggcaccaccaggagaggctggaggctaggtcatggattggctgactccaagatgcccagcacctcttgctcccatgtctaaggggtactgtatggacacatgaagctttgtccttgtcctgggcccagaaggtaccagttgatgctgcctctgccacctcttagctgtgtgcccttgggcctgactctttaactaagactcagatgccttatctgtaaaatgcaaggtttaagcgccttcctcccaaccctaatgcttgatgttctaacttatccaaaatcctatttcgggggtggggggtggtcctaaggttgaaaataataaaatcaaggtgcaaagaagtgaaagcaagtctctcaaggacacttggccttttgggggctcagatctatatcctaaacattaaaaaaagtaaacaaaataatcatttatgctgctatagccttgtcagtcagagacggttctaaaacttccatgtgcatgaggatcacctgggggactggctaaaaataacagtttcctgggctccaactcagagattctgggatagtggctctgagctgggtcaaggaatctgcattttaatagcttctgggtcatccttctgcaggcggtttctgggccacatcctaagggcactgttgtgtgcccacagcacgggcttgtgggcctgggttatttctagttcaggctctgtcactgggtggccttgattaagtggctgtctctctctcggggtgcgcattgatgttcccactgcacagtgaaggcattttcacaccttttgaaagttcatgcaaccctttttgtcagtgaagtctcacagggaatcccagtgtataaaacggtggaggcagagctgaggcagcgcgggaaggaccgagtcctgccctcggcagccctgcagcgggccctcaggaccctctgtgcaatgctcaaggattccaaaggccctgtgcagttttgatgctcttcaggtgtcctgtgaaggaccacgtggctatatcccactgacggtgtgaaagcaggcccacccggcgtgcactgagtgactcaggcaggctggtctgaagcacgaggtgccttggtcttgctctctgagcctgcatggagaatcacagctcagacctggtgcttatagaggagtcttctcatggttcctggagttgttcccaactggacacagaccatcttggggcaacgtcctgggtttctcccctcttggagaccaaatacaatcaactcttaattatctttgttagtggagaagagcagggtgtgtataatctagaatgatggacaatccaaaacagtgaataatcctaagtaacattcattttcgactttggaatgcattttgatattcacatttgaatatggatatgtttgatgttctaggaatttttcatacttaaaaaaaacactcaacccaagggtggggctccctctctgcctcctactcagctgaggggagaacatcacctctgggactggcccaaagctacagtcaggtgcaccccaccttccccatctcctgtctttatggctcacaccttatctaggaagggagggggatattaacagattttgcctttaaaggacttttattccctttggaccttatgcaaataagagtaaaataagaagctgtgaaatgttaacagaggacttcattaagcaaacttggtgatagcatttgccaggaatggggacaatttgccaacagatacttgagtgctgactatatatgtgtcctaattaaaaaagtgatacttctcactgccctgggattgtgggccgtcttctggtgggtttgggatattaaccacaactaactccgatacaaagcacttcacatacattatcttacctaatccaccttcatagcaccccgtggagcaggtcccatcatcagcccccatgtagagacttgaatatcacagctccaagccagatgtcccccgtgaatataccctcccaattctgccctattctactccactctgcctctcctgtcaccccccaaacagaggccctgcaaagcctcagctggtctgcatcaatcaaagagaacgaagcaaaactaacttgccattactgccctagtctctctgattgttggaagtagagatgtttcaaggagaggttttgtgctggaagccccttgaaaggatggagagggagtgtgaggactgccggagacgcccagcctaggaggggaagctttctgcttttccagcaggacagaactccttagaagcaggtgtagccctggctcatatccaccatcctgagaaatagaaaatctttcccattttacggacaaggaaactcagagaggttaactaacacatccagggtcacagggtgtggtagaggtagggtttgagccatttgactccaggcctggctttttttcccccaacagtagccggtcagcagagggtgtttgatctgtgtggtttcctcttcagaaagcagagactcactactgtgccccctacctgcccccagctgagctccaaaaacagctataaagctgatgggaagccgataggacagcccctgcccttcctgaagaccacggaaacctctcccatggtgcccttggggctgagatcagctctgtcaccaatacttcagggcaaaagtcgttggcaccacttttaatcctaatcctgtgtggccttattcagaagccctttgcaaaggccgatccctagccatagctctctctgctcggccttgggctgggtgaataatgacttccatttcctgccctgctggagccttgggtctttgccactgccaccgtggtgctgagccacttatttgttgtgagatgacccaaggaggaccagccggtacctgctaggcccttctgctggggcacggggtcagggggcagcacatgggcatgtggccccactcctgtctgctccccaggacaactctattttccagcatggagtgcccctggaggtggcgacagctcctctaataagagagttactcatggcttcactggagagaagagagcagctttcaacccccctctcctaaacgcaacgatatttggtaacatgcggcatcttggggagagcattcatgtctgtaattagttactgtatatcacggttagtactctgctcagaatttacggggcaaataccatttaactgcacaataactgcaggtccttgctgcttattgggtaatttactaaggctggaagaacggggcaggagggattctgaatgggaggtattgtaaccccttgaatcaaactttatgagtttgggtttggcagggaggcagctgcttgcagccagttctcttctctttgttttgcagagttggctggcagactgcttccttcccttgatttattgcaggatgataggtctgggactgggggtgggactgcccggggctacctggggctatggaagggactttccatagagggtctttggctgagagtctgcagcaggaacccagagtcggtgtcctgggggctccatgcaggacagcaaatgggccctgtcatttatttactccctccacggggctgctttttgtatctgggccagtgggtggagagtgcagggagctgtccttggttggcagcatcaagataatcgcctaagccctttcttctcttgcaagtccgttgctgcctgggaagcagccattcctggacacttggccgacattcctggccttaatctgcttgagcaaagtctgtctttgtttggccatgcactgtctaaactcctctaacctatttaggccacagagaggggagaagacacaataatgaaaaactcaacgtgcaacattgccttacgcaatctaataaattacttggtacccggctgccagctcagactaagcccaatattgcctgcagtaattatttggatcaaatgcagtttatctgcttcatatttgtgcttctgtgctcagtgataacttataaatgtcattgtggtgtttatttgttataatgaaacttaatggcattggaagccaagagcagaactggtggggcggcaggtttaaaacaatctcttcatctcgggagaaggaatgagccaagataacatgaaactgccctatagggaagagatttgcagagatagtggtgtcctcgtgctgtgtggtggacgggagtgagccaggagctttgagctggcaccaaggggagccgtctttgcctccagagatatctatctggatcggggagacatggctgagcttcaccctgcactgccccatctgtccttgctgctttcaggggtgggaggtgttcagtctttataccacctgatgcctgcctgggataagagatgaatagggatggaaattagagtccctgggccaggcacggtggcccacgcctgtaatcccagcactttggaaggccattgagggaggattgcttgagcccaggagttcgagaccagcctgacaacatgtgagaccctgtctcaatttttaaaaataaaataaaataaaataaaataaaataaataaaataaagaactcctggatgactgcattatggagaacaggccttcagggagaaggaagggagcagggttggagaataaaggaggatatcatgagggcccagacagaaggtggcaaggctttctcttctggttctggagggcattggtggtaggaagcacagagcatgagcagaacagggaagagctttcaagggttgcagggcagggcccccactggcgctgcagaagtacctgaggcaagggccatttaatgtagaactcagggttttggcttcatacagtcctgggctctgctatttcctagctgtgtggctttgggcaagttatttgtctttcctaagtttcattttctttatgtggaaaatgtgagtgataatagatacctctcaagattctggtgatgattaaatgaagtgatgtgtgtaaagtaatgactgtggtgtttggcacacaggatatatgataaataaggggctgtggcagtgattggcacatagtagatgttcaataaatgttgaatgtatccatgaataataacacttcccacttgtgtgcattacaaaaccctcctccaaacagctgagcttggatttagacctcacaattgttcagggttgatcttctcattttacagtgggaaatggaggcccagtgaggttatggtaacttgcccaaggcttcccagctggtagatggaatggggtcttagttctcctacctcccagggcaaggttgctgccaccagtccaccctggacagctcccaatctgtgctgggagactgacctcatccttcctgatgagctgcccctgctccttggagaccaggcacagagcctgtgctgacctccccagcacaacctgggggcagaagcaagcgggccgctttctgtccatttcatcttaatacaacattcagcattcactcataaaatattcattttctctcctcggtgacatgctcatgcaagtctcctaacatcataaatatggatgaagactattagtcatttttatttatctcactagccccttccctccccagcacaccttttgtcttgatctcagcacaaatgggactgaattggggctattaacccggatctctgataataaagccttgcatcctgtggtgctttatactttttttcaaagcatcacgcaatcgtgatgcatattttctccttacaacaaatgcgtggaggaaagagggctagcatcatgagtatacccatttcgcagatgagaacatagaggtcaagagagatcaaggtcaaagtcatatactgagacaggaacagaactaatttttaaaaaacattattattgttatttgtttgtttgacctccaaggaaaggttctctgggacactgagtgtgtttgcttcacacaaataaataatctgtatagtattttacaagtttataaagagtgttcacccatgttacttggtgggtccccacaaggcaggtatgatttactcttgtttgacaaagctcacacaaccagttagtggcagatctgggctctaaaacattatttcccaaagtggatttcagggaccactagtcctgacacatgctgcaggaaaaatgttttgtggtcaaatgagtttgggaactctgtgagtcatatcccctttgggtggcttaccatggcctttggtgtattagtgtctctgagaagttctgcaggaaagactctcattttgttaggtctcatgtagcttctccccaccgtgtctaatcacgaaggctgcatctgacggaaaacctattaacatgctacagaaatgctgcctgtgtgtacgcgtgatccctcctcccccgtgtgtttggaggcagtgaggattagagcgtggctgggagaggagcgtgcaggggtaaggacggggtaggggacccactgctggggactactagagctgaagctcccctcctcaggctgtgtcctctctttccctctgggcagtgcagaaaattcactcaatattaggcacagtcagcccagcccatatctggggcaggatcagaggggccgcctgagtggcggagtggggggtctgtggtcagtgaatggtgggagatttggggacggcagtccttggccatggggaaaaatcaacagggacccacaataggggcttagtcaagtctgccctggacgatggtggggaagtcaccctatcctcgtcgcccagacacaaagctcccgaggcagggtggaagtaagaaggccaggctttggcgttcagctggcttactctaacatctgtgtgcctttaggtgatgatctaatctgtctgagcctctgtttcttcctcctcagaatgtggataacactacccactttgtgacgtggtgaggattagatggtgcaagtgtgcaaaagtaccctccttggccctcgtctttgtgtgtcagctccatctctcttcccctgcttttttggagcccctcagtcagaacaaatagcttcccacctccagtcctccacgagcctgtcatctgtacctctctttagttctcccatcgccctgccttctgccattttattatatgcccatctccccaatggacctgaagttctctgcaggctgctgctgactctctcagtgcccacttgtatctgcaggcccgaccatcccgcgtcttcaggccaacctcccattgccggtgtctggaccccttctcttgagggctttctctttagttgcggaggccactgtgccctcacacagagcaggccagacctgctgggagacaacaccctcacccagcagcactccacccatgccctacaggagctggtgcagaaataccccaccgcttgggtgccctagctgtgaggtggtgttcaatagcacttctcagagtttcttactgggactgggctctggctgcccatagtggtagcaggtttggggtccccccatgccgatgcctcctttcccatgtcaatttccaaccctcccgctggcacctctgcaccttcatgaggaatgactacactagcgctcttgcttagggcctgcttccaggggaacctgaggtaagataagggcatcctccaggtgtcattcatctctgcgtacacagtgggtgctgatgaatctctgaatccagcagaaatgagccataggaacagcgcaggggtgactgtcaatcaaggcaatgacgtcagtgggctcaccacgtgggtgggtcctgggagcaacgagatagaatacctgctcccttccacatctggaagcatccacagccacactcacacctctgtaccttccccacctaatgtttagtcaaaccttggcaggcacagaggagctgaggtccagggtcctttctctatgagctgagaacaggttagtgttgtgttttgagatccttttatgaataatggttgagaagtgctgctctttagtactaagaatagtggttattcctagtgcatttgactcggagatggggactattccattgctctatttgtcccacactcggtacacagttactgaaactgtcaccgtgtcctatattccataggccattatgtgtatttcaaaccgttatataaatggacttgatttggcacttctgaatgtcattaaactcctcccataccagtaacaacacagtttccatagaaacgaatacatttcagaaaggaaggcacagggaagaaagcagatggagttagggggaaaacgcggccccctggttcctacttccagagcacagggcccggcactgtgacatgagcactctgtggaggtggggcaagctccttcaggtttttattgactccctttgataaaagccctggataattcatctcagcctgaacctgctcattccagcgcacggctctaaaaactttatggcaccgcaagccattaagcgccttcgtttattccaacttctctggggctttcttcagaccctggggagagggctgggggagggtctcagcactcaaagaattctgtgatgaagcctttgaggctggctggggatggaaggaagaagcagagagaagaaaggaggcctccccggtgcagttgacatagtggagaccccaggatcttgccagtggctgctgtccaagtcactgggtcccctcgtcatcagtaaagctagaatgcgaaaactgcagcctcctggggtggaagcggtgtggcgtttggagagcctggctgaggagctgcccaccgcctcggcaggctgcaagtttcttgtctttggagggattcaagcataggttgcaacagcctcttagaataaaacatctcacagggcttatttctccagaagccatgctggacactcctctcctggcctacagtgtgattggattctccttctctgtttccaatagctacttattcatacccggttaccgcaactgcgacattgtattgtagttgctgacgtgtttgtctctccccgcaagacagtggtatccttgggggcagggactgtgtttttacatgcacagcgccaggcacagagcgggtactggacacatggttggtgaataaatgagcattccgccgtgttcacagtctttacacacactggtacttggcagggatatggaaccagatgacctttggtcccttctggcctggagaatctgtaatgataggggtctaagcctgccctgactacacccgggatttgaatctagatttctcctactcctaagccacagggttacgttaagaatattagtcgcacgcctgtaatcccagcactttgggaggctgaggcgggtggatcacccgaggtcaggagtttgagaccagcctgcccaacatggcgaaaccctgtttctactaaacatacaaaaaatcagccaagtgaggtggtgggtgcctgtaatcccagctactcaggaggctgaggcaggagaatcgcttgaacgcgggaggcggagcttgcagtgagctgagatcatgccattgcattccagcctgggcaacaagagcgaaactccgtctctgtctcgagagaaaaaaaaaaaaagaatattagtcgcaatgataaaaggaaaaccagaaccaaaacagccacaaaaacagctgggtgtgaaatgttggagaaaactctccccaactgcatttttcctctacactcaccacaacagtccacacaggagacctctgtggccaaacaggtgggagcagcggacaccagctgggtgtcctccaattcaattctgacactgtctacctggagatagtgtcagatcccacaggctgggggctcagtccccaagacttcccccacaccctggcacctgtcacaagttcaggcttccagaacttctggcagacccgctgcaagttgggggttcccaagaccttctgtttgggtttgattaatttgctagagtggcacgaagacctcagggaaacacttacctatgtttacagtttattctaaaggatattacaaagaatacagatgaagagattggggggaaggggcaggagcttccacgccctccctgagtgcgccaccctccaggaagctttacatgctcagctgcccagaagctcccgaaactcagtccttttgggttttcatggaagcattccttcccctagggtgtgaggcgggactctctcagggaagggtcttaagacccacaatcagaaagtggtgaaaggttagagtcctgcgatggggcaggggaaaggagggccggagagagatcctgtttcccgaggcctgcccctgaggcctaacacacccaacatatggcaaaagactgtagcaagggctatgggagttatgagccgggaaccgtggatgaaatccccccaccccatgcgcctctatatagaaacatgtctagatacatcatcacgcctcaggccatgccctgactttcaaccactgatcccttacagcaaaagaatatatatgatcatttaacaattagtccagtgcactgtattgcatgaatgtctcccagggtgaggccactcaggtttgcaggcttttttttttttttttgagacagagtctcgctctgtttctcaggctgagtgcaatggtgtgacctcggctcactgcaacctctcctgggttcaagcgattctcctgcctcagcctcctgagtagctgggattacaggcatgcgccaccatgcccgactaatttttgtatttttagtagagatggggtttcaccatgttagtcaggctggtcttgaactcctgacctcaggtgatccacccgccttggcctcccaaagtgctgggattacaggcgtgagccactgtgcccagcctgcaggctttctttagatttgaagaaaagattccaaaaccaggagtggtcccagcaaacacagcttcccccttccaggcatctggggataccaagcaaagagacaatgtcctcttttggttcgagactctttccagttgttaatgtagtattggatttccttcattttataacccatttttcgtttctttactctcaggtattattcctcattttctccactagtcgtttattttttacctgcacttttccacctttggaagggacattgggttcggccactgtgtggtccagatggctgctggcagcactagtccagccagtgcctcccctcagtccattaccattcatacccgggaaggttacgtaagttccaaacgagtggactattcttaccaccaggccccctagttggatttactcttagccctaattttgctagacagggtgaaggcacctcccacccccatcagggccctaggaattctgacataaggtttaaaaacacagtgacagttttttgcttagaagttatctctgtttccagcacttgtagttgcagccctggtcccgggatcactgcatcacacaggggagagagaaaagtttttttttttttttttttttttttttttttgagacagagttttgctgttgctccggctgaagtgcaatggcacaatctcggctcactgaacctctgcctcccgggttcaagtgattctcctgcctcagcctcctgagtagctgggattacaggcacctgccaccatgcccagctaatttttttgtatttttagtagagacggggtttcgccatgttggccaggctggtctcaaactcctgacctcaggtgatccacccgcctcagcctcccaaaatgctgggattacaggcgtgagccaccgtgccaggccaagaaaagcttttttttttagctgagttgggaaagaaagaaaaaaatagtcattataccagtgtactccttccttagcaagaattgcatagttatctagcatccttcccacatcctcttccccagatcagccagaaaaacagaggaaaaagtctagtggggacactagtaccactcatggtgtgtgtgagcacactcgtgaaggcgtgcaagccagcccttcatgcttttatgtccccattttagacaaccaatatttcaatagcctgttgtatttctctatcaaattcttactctaaggagatctctctgaccattgctggacattatgggcttacagtgtgtcccttggtctgaagaaatgatggtcagctgtccaaatgcatacaatatcttctgttccatttttttttaaatgacactctgagcacttctatcttctactgagtaaggaaagcccactccagagtcagtgtctattctaggcaagacccatttgtagacccgcagcaccagtctcacttgctagctgtgtttagagccttcccactagggaatcttccacatagccactggcagtctctgtctctcttgctggcagacagaatagctcttactggcattatgtgcctgagagggtgcaaagggaacatgtccagattcagcccatctctacactgctgcggtgcctccatatctacccatttcatgagcccaggtggccacctcaagggagcagctggggctatctgcgtgtcgattcccgtcaccttctgaaccttgaagggagttcttctgatgggaactgacttgttctgctttaatgcacccctcaaatttccatagggctgtgctccacatgggcatcccattaaaaggccaggtttccattgcccttctgcctggccactcggccaggccattggtcactgcccatgattcagtaaaacctaaacacagaggcctctaccattgttcatttttttccatcactattaggaaaacagcatgcaattcagctcatatgcagacctgtatttaccttgtctgatcaaagtagtaaccttcgaaacaggttggtgtccattcacattggaactgctgtctgtcaaccaaacagctcctgagtcaatcaagagctgttcataatgcactgtccacgtgttgatcgaatccagcagcacctcacacagttccagagtcagttctagggggagaagaagctccctgcctgagagtgtcttgtccttgaattccacaggcagcatgatcctctagaaaccatttccattttatgtactcttctgggcactgctgtccccattagaatgtttctctgacatcaccgaagacaggatgagtatttcaggtgggtcctgcgcacccaccttccaagacagctaaggtttcatagcaaggcagtaaatgccctcaagtggaaattctctagtccgaagtcctagcagttgctgctgggaggtgctcagaggtgtttgccataagccccaggaattgctccatagaagtatatggagtcttcccaagaggaggtaaactttctggggaccaagacaagtgcccgctgcctgtgttactctggatgaatcacatccctttcctgagtcttggtttcctcctctccaggtgactgccaatgtttcttttaaaagtctatgattgtcaaattatccagtcccagcatcttggagctactgactaggggcagagaaggtcactgtcctcactttgctgacaacatctatgcaaacactgtgttgggctcctgggatctaatggagaccaaacagagccaactgactggtaggggagacaggtgttattaacacaaaataactgggctcccagctaaaccccacccttaagcctggaactgcagcccttagtgaaaacaggtgactcaatttttctcccaattgttgcttttttggcctgccacatccctatcctgtgcccatgaaaagacttcagctggcagagtaacacaagcggctgagcgtcagggatacaagtggctgagtggtgagcagggcagcaactgggcatcggagactatggatagacgaggctaacttcagacagtgcagcttcagggaatgattgccttcttcctgcaccatcccctttccaactcctcattccgccaagagccccttccatctcccaataaaatcctccgcatacactacccttcaatctgttcatgtgacctgattcttcctgacactggacaagaagctgggtgccgagagggcaggagcttggacactgctgtggggccgcacagagcctgcttctgccagagatgagtgactggccggttccagcgttcattccctctggttcctgcacttgcttgctcacacactccctctctcaagcagtggccagaggtaggctgagtgaaacaagccactccagttcccacccacaaagagggtcaaggttaagggaattatcccatctcattagtaaataattgcaatatgaatgtatatgtacaaactgaactcagagctctgaaaggaaggatctggttctacgggagcatgtgacacaggaactggatcttgactgaggagggatgggtcagtggaggcatcactggagcagagacttgagctgtgatttgaaggatgagcgggaattaccaggtgaagggtttggggatggggtgagcgtggcaagcagggtagacacagggagcagggtagacacaggccctatgacaggggccctgcttgaggagcagcaggaaggcccatgtgactggagcgcagggtgtttaagggggtaggatgaagtcagaggtaggtaggaaccagatcacgtggcaccttgtagaacatgctaacaatgtgagcattttttttttttttgagacggagtctccctctatcactcaggctggagtgcagtggcacgatctcggctcactgcaacctccgcctcccaggttcaagtgactctcctgcctcagcctcccaagtagttgggattacaggtgtgtgccaccacgcctggctaattttttgtgtttttggtagaggtggggtttcactattttggccaggctggtctcaaactcctgacctcaggtgatccacctgccttggcctttcaaagtgctgggattataggcgtgagccaccgtgcccggccttcagtatttttttcttaaagccattgaaatattttcaaaaggaacatgacatggtcaaatttgcatttcgaaacactgctctggctaaagtgtggaaaacgacctgggcatggggattgggcatgatagatgcaaggagccagttaggagagccctgatgcagtccaggggagagaggctggggacagggtctagggtggtggcatgagatggagagaggagggtgggtacaggaggcactcaggagataacatccctaggacttgctgaggactggatatgagtgtgagggaaagggaagttataaaggaactttggctgggtgcagaggctcctgtctgtaatcctagcactttgggaggcccaggtgggaggattgcttgaggccaggggtttgagaccagtctgggcaacatagtgaggcactgtctctacgaaaatttaaaaaattagctgggcatggtggtgcatgcttgttcttctggctacttgggaggctggggtaggattgcttgagcttaggaattggaggctatagtgagccacgatggtaccactgcactctagcagaatgaaaccttgttttggtgaaaaaaagaaaaaaggaacttggcagggtctgcagcttaggggtccacagtctaagagaggcaggactcctggtaggaggtaggaaaggtggctggaggaatgggctgagaaaaagctttggaatgttccctcagatcctggctggagagtggaaacggcaggtctcttgttccaagacactgagcgaaataaataacaatcataaagtgccctgtaaatctgactcttgccataaataataaacagggatattatacaaataacgggctttgcagccccagtggaagaaaacacatcagtaagaaaaatgaatttagaaaaaatgcaccccaaagccccaactaacaaaatgacggtattagccaacatcccgggggctcggcaggcagtggaggaatgggctcaggaaaatgactgtggcccttagcgcgagccagactgtacggctgcaacagagtgagaagtgctgccggtagcagggaggcctgctcatccctgggtcaggtccccaggccaaggaccctggcctgctgcttcccctctgccctgagaaaagcacagctcatcccacaggcctgcccgactctttccctgccacccagcatatagctgatatggcctgagttcacccttaatgacagatgggagaaagaaacacggatccaccttcagaggctgccaaggaaagccagtctattgacttttttgtactggttcctttggtgaccaagacatttaaaattatgggatgggctgtgagaacagggtgtgggctgggtgttgagatccaagatagatttttgaatcatcacattttagagacatacaggtcatcttatgaaacatgattccattttgcacatgagaaggttgagatcttagtgtctagggacttgcccaagctcacacagccggctcctcactcttaagtgctcctcccactacacatcccagctgtggggcacctctctttctatacgaggaaacagtagaagctttagactcatttttttattagtgtacgagggtgcataaagaacaggctctcacgccatcataaagaactttagagctgtcgaagaaatgagattctcaacctcccagggctctgactcccctgtaaggctgggaagtgaggacaggtgctgtgggggaggggcatttgcacacagagcctggactgggaccacagtgctgttcgggagctgtgggccatgcaagaggctgctagttatttatggaaccagctttccccttcctgggtgctccagctcttcccacacagggtagaggtctccagtcagcaaaagctgcctttgctaatcactcacaagtatttcgtcctgaaagatgaaagggacagcacccagaggcatttctgctctcccttggtctcttgaagcagacatcattgcaatgctgaaagtccacggaaaccgacacccaccctgatgggcagcccaagaaggcaccagtgtgagggaggagtaccctcctgtgcaggcccccctctgccccaaggggatggctgaaggggaggtcaaaacttcggtgcctctgcttcttccctcctttaaatatcctcttcctcatttccccttctcaagagtcctgtggcctgccagcttttctggtcccccaggaatggtcttctctggtctgtgtccctcactccaggtctcccctgattttctgcaaatcaactcaagttttccctgtgttctgccctttcttctccctgccttgccacttcctctctttccagccaccctgaaaaatgaaaccaagctgaagtgttagaggctttccctctgctcatggtctcagcctcctcttccagaagtctaagagccctgggtgtctggagccctgggctgtggtcctggctcttccagccacttcatatgggccccgggcaagttgctgcatgctcttgggccatgctgtgttattgggttgcactgtaatctctagagttgttgacaggtctaacatagaggaggcctgagctctctgaggcaggcacagcccctcccctgatacatgtgacagccttctactctgcctgggaataggatcaggtctggggaagccatgtgctttgagaaggtgagtggtctggatctccaggagagagaggtcataaagggggagggccaggaaggggaggtgaaggttgtgtgcgtgtgtgcacacatgtgggtgtatgtgtgcatgtgtatacatgtgtgcaggtgtgtgcatgcatgtgtgcatgtatacatatgcatgcaggtgtgtgcattgtgtgtgtatgtgtgtgtgcatgctcatgtgtgtgttggagatgtggctgaggaaccagtgagagtaaactggatctacttaaagatgtcctgagagcatgggctggcagtaggtggggtgaggaaggagagctggtacagaaagaagggaaactacccctggggaaggcctcctcacccagccctgcttccacgacttgcctggaccctactcccaggaaggggctgtagcactggaactggaagaaagcctgagagtgagcaccaaggtagactctaggaatcacccaaaacagggagaccattttgtggactgttccacatctgtgtgctctatctgaggcgctccttttcaatacctacctgacacctgtggggactttgtacattcctccattgtcactcagggccctagttaattacctaaatgaaagttgagcgactactccctatgtgcaagacactgggcgaaggcccagggagaggagaggaaggaacaggagtctttgccctcctccagctgattctctacatgggactgacagcacatgaggaagcagaccaataaataatcacacatcatgataggtgccactcgatacacacaccagctgctgtgatgagcacagggtgcagggagagggtgtctgtgtaatttaggtagatggaaggcaggatctctttgtggaggtgacacatacactgagatgtatttttactgtgagctccttgagggcagaaaatgtgtcttactctacttttttttttttagatggagtctcactctgtcactcaggctggggtgcagtggcaggatcttggctcactgcagcctctgcctcctgtgttcaagcgattctcctgcctcagcttcctgagtagctggggctacaggtgcgcaccaccaaccctggctgattattattatttttttttgtatttttagtagagacagggtttcaccatgttggccaggctggtcttgaactcctgacctcaagtgatctgcctgccttggcctctcagagtgctgggattacaggcatgagccatcgtgcctggcttgtgtcttatttttatagctccagtgcttagaacaattctggcacttgtaagaaattggtattatttttatggtattcaatgactgtttgatgaataactgaatgatcactcatcagcagttcctatataaagcacatgtgcttaatcacatgaagacaatgatctcaaacaaatgtgatattgttatggctagtctgtctttacttcctcctttcttgcctgccctttgttgatttctgtttgtatctccttttgatggctcaattgtgttgggtccacacagtagaggacacacacgcacacacacacatacactctccatatattaccaaccacctccattcctgcaaagactgcagattctatccacgaagctattaagcactcccaaatagagcaaacctctcattgactatcacgtgcctccttaaatgatctttgaatagcattttctttttattgctttgtgtagtttaacggcaccaattgcaattactctaacttatgataaaccccagatctataaagctcctgttcattcattattttcctcttgctccttctcaagctgttattttttggaatgtagtgaggagggaggagtggagagagaagaaaataaaaggacaccaaattaacaggaaaacaaataaaatagggaagcacttctccctgggtgacaggcaccttattagatactgttaaacagaacaaatatgctttaatacagcacaagtaggtcttttatatttattctaaatgggaaatacaatgatcatcaacttatctttaagggaagaagaagctaattgttctaatatctcactaatcctagcaactgggagaaaaataattgtttttccctattttaccaattgttcaatttataccaaggtgtgttgtgtagcatggacagagatttctatttcttgatgtatgtcatggctgctattccattttaattattaatatgtggaaattataattattttgagtattggtatgagataattataaatataaaacagctccgcatgctttctgatgcctttcttatctgcagacatgttggagtttgggcgtatgagctttagagagagagaaatgtataatgtggtacttagggcagcaaggctggctggagtggaagaagaggagcttcctccctccagagccctccctctccttcacctctgccttccagctctccagagccaaagctgacccacctgtgtctctcctctgccccactgcctcaccctcctcttaccctgtctctgagttgttagttgagatttctaactcatcacacatgttggctcagcttgcatcccatcccctcatctcctcagccacccagaagctgaggtcagatatctggagctatgggtttcaattccagcccagctcctgactttttggcttccccaatccctacaaacctctttcgagcttctctaatgagcatcgccagcaagagaacatgtctattcagcaccacggacagaggcacgctgtcagttcccacaaattagaagttactgcctagcagtcttgtcaaggcagtggtgttggggagggaaggggaggctgagaaagagaaaagtcagtaaaggcaactgactagcaggacacagaaaatgcggcccccaactctggttgtactcagccatggggttcctacaaatgggaagtagctttttgatgctgttggcttcaggcaggcagcaaatgggggaggtgatcacttcctgtgcttaattgtgctggcctaactcttgtcagattgtcaccatgatgggtgctggaaacaggtccacagctggcaaagtctcaggcatggggagcgcatggggatgtggttgtcgtggtcggggttgggaggagagacagctgaggagcttggaaagagggcactgagaccatgctatggggatagagatggtagaaagaagcttcctccttcttgctggaatgggaatgaggagacatgggccctgggccctggaaggggaggggtccagcccatggcaagcatggctggtgggagccaaggcttcatttgtctgactttaatgaataaatggcatccccagccattgtttatctacttttgaatcctgacaaatagtctgtggcatctgatggagagggttattagctgcatggagacagatggctagggatggagaggattggttctttattacagcagacccgtaagtgacagcactcctcctcccagcctctatgccaatgtcaacacgtttctcaagccttcagtgacccaatgaagccagtgcaagaggaagacagaatggcctctgagtaagagggaggggtagggtcagtggagttgggaaagggggcaggtttcctagggtaagttctttgggaataaagacattgccatattcttctttggtattctcctaagtgcctgtatagtgctgtttattcaacaggcattcaagaaacatgagtgatggaggaggcaagtagagaggtctggattagaaatgaaaataggagcagatttaattgggctggctgtggggtggggtgcggaagaaatggtagggaagagagaggaagagaagtaggagacacaaagggagaagggaagattgcataaagaaaatgcccctgaatcagcatcctgtgtttcaggcattcactatgcttccccatgtgattgtacaaatggcttcatggaaaccaaactggtcttcccactgtccccttctgagaggtcccaggttcttattcctggttcctctgtcctgtggctgtaggggagagcttcctccctccagattactcccgagacaatggggaggttctcactgaccttcattcattctccgaaacttgtccttggccatgtagcccagcaccagacagcatcctctcttctggaggcccagctctggaagagaagcataggtgggtgagttgggaatgggaacaggtcaggcattgttggggggccctctgcagggggctgtggagcttgttgctcttataaacagaggtgcttttgtttagccaacatttatatggaaattgttatgttccaggcataagtttaagccagcaattcttcattttgattctcataacaaccctgtgaaggatgtttccccattttctatcatccccatttatagatatatgaagttagtggcactggatgaaagagctagcaggtggtaaagccagagctttgaacctaggcagtctggctctgagtccatgctcataaacataactctgggttattgaggccctttgtatctcaggcttggggactatgctcagatcaacttgggactgtggccagacctgccagggatgatgcagaatctatccagtcgtgtctaggatggaacagtgcaaccagacatggtgggtgactcaggaggatgaagtgattgcgtgagtttagggcagcggggcgacacagaggttaaggtataggcagaagagctctctctaccttttggagagggtgcgtttctggtgctagagattcctgtgccttcctatatcaaggcccaatttagcaccatcatcaagcacttatgaaatgtagacttagagcacaggggtcgagatagctgagagacacggactccacagggctttgacccagttggaaaaacaagatggaataacaattccaggtagcaaatgcaagagataacttttttatttgcacagtattttgtaaatcagtgtccattgtgtgtgtgagcattaaattggagtccatctgcctcacaagaaggcaagctttcctctctggtatttgtgctttatcctgattcatcttaatcactttatggatcctgaagcaatagcacactaatttttttgacccccctctacccccaaacaactcactgaggtgggcatatgggccactgcaactgacattatgcagatgggaaaattgaggttcaaccatgttaaatgacttcccacgattgtcttagacccccaccccaccttgtagcatagaagtcttacaaatgtgtcagctgccacaaacttggtaaatagataaggaatttgatttctggaagagggaatatgactgcagctcttcctggcccttgccagggtttctgggctcctccctgctccttcctttgatttctcagagaaagagggtcccaatgagtgatgcatcacagcaccttctcccacgacaccgactgcctccctgaacccagccagtcagtgtctaggctcaagaggatagacggagcgggtcattcctctttctcctcttccatccaccgtctgcagcccaggtccacccaccaagcatagcaggatgaaagagagtgcagggcccatgagacacagataagtcaagctcaggggctcttgccctagagaaaaacaaaacatggcaggaggtggcagaacgccacggcccagggaggtccctggctttgatctcctgattctttaaaggggtttattgactatcagtaaagagcagagaagcagatctgagggcactgtttccaaaggcactcacttctcttccttcccctccacactggcgtctgaaggcttagccaaaccgccctcacttcaaacggtcttacatctcaggcacccaaattgacgatgttaagttccctcattcaaggccttggccctttcttcaggggctcctgctctgtcgcaggcctcatggatcaaagcccctttgatgtttacttactgtatttgtggattctttctaacaaccaccttcaagaggcaggaatgcagccttccaggagggggccagtggaagtacaagctgcgaggaggtgctgagctccctggaacaatagcctctcgagggagactgtattgaaacctcaacacgctgacgacaggcagagttaaccagcccattgtaattgcacacgcattgttcatcattagaatgatacaattgctgacaattcctattatatttttgccattgacttcgtatgcccatctaaagcacatcagcaatggctcctaatgagaaagggagtttgggctcctggactaagcccaaactcaatccaggagcttgggagggaggcaggggagcactgagtagggagggcagaagatactggatggatttaggccaatgttccagctggtcttctggactgtgactgaacgctcaggcaaatggaagggcgaacaattctcttacagatttagagagtgtgagcaatctgttgactctggattgtcttagttggatagagaactcaacctctcctatgccacatactaggacaccccccagggcaactgcttgaggagaggctgtgtggacaagtggttatgatataataactaagagtctcactgattatgtttgatttttgcaaatgagcaggaaaagaagttttaaaaaacctgattaataaaagaaattgagaatgaggcaatttctcaatgtatttggctcatttaatttgacacgcgtgggttagtcttaattatttaggcggctacgttacaaggcgctaataagcacactgcagaaatttattaagtgcgagggctctctgactgagactttgtagagaagtggggagaagctactgggatctttgcaagaacgagcaggttggaggatgagtgaagtgagaattagttaattgtccatatatgaaaatttgggatgtcctttggagagatttgcaaagctaaattaaaggtcattgggttcacatgagtgtgccagcagggagtgaagtgggggaagggaggggatgctggaaacccaagtggggaggtgaatattgtccaagctactaaccacagagagaaccaggaggaagcaggaggcaattgctttggcttggggagactctaccaagccaaactaactaggttattaggagagagatgatagaacatgacagaaagaacaggaatctctctctttgtgaggtagatcagccaccaccagactgtcaccttccttgtcccatagcatggagatgaatgggagagtcagatcacagatgcacattttggaacagtaagatgatgggatcttctccaagtaggctttgggggtgctgtctttggctttatcagtagcagaaacacccagatactctaaagctggctatggaaaaataattaccatgaaaggagtcagccctggcttaaaaggaaagttcatagcaaggaagtccagggtcacctgcagatggggcagtggagggcactgtcccaggaacaaggaaggtttaggaataccacctgtgcaaggaaaaatggattggagtagggtatgtttcttagggagaagataagtttgcacccttgggaactcctggcctctggactctgagcaactgaagtgtcaggactgtgccttctcctgctctgagcccgtaggaccaagcacagtgcctgacacatggtaagtgctcaggaacagtctgctgacttaatgaaagggctggctacaaaatatgggactgtgaagggttccttctgactcgggtcagaatgaaaataagtgggcttcactgtagcacaatgggtttaggttagcagaggttggttgtagagtgaatgaaacttgtagctcattggaagagaagcctagataacatagtgggatttcctcctgggagaaataaaaggggatggctttttaaatgggatgggttttcttccatttcagagggtgcagatgggatgttttctagccttagaattccttcattcttactagtaatgtagtgatacggtggtattatttcatatttgtgggatacttattttttaatgacgctgtcatattccctttctctttagatgctcacagtaagtagctctgtgacacaggcaagtcagaaattatctatttcattttggtttcacaaactgaggctcagaagtaaagtgacaatttaaggccaacacactagctggtgatagtgcccatgctggaacccatggctgatttttggcttggttcttagggtaaagtacggggtcgcagagctgcagatgctgcaaatcaagacagaccagagactagagcacagatcagcggtgtgggctgggacagtgctataggtcgaattcctcaccaattctgtgttcccctcctgcaccaaattcgtacattgaagtcctaatcccagtccctcagagtgtgaccttgtttggagataggaaatttgtagaggtgatcatgttataatgaggtcattaggacggacctttatcctgtgactggtgtccttatgaagaggaaaatctagtgatagacacatatacagggagacgctgtaaaaacttgaagacagccatctgcaatccaaagagggtgcctgggacagatccttccctcccagccctcagaaggaaccaactctactgactttggacctccagtctccagaactgtgggacaatacatttctgttgtttaagccccacagctggtggtactttgtaacagcagccctagcaaatgaatatagacaggacagggaggagtgggtcttctctgaggcctggcaatttccactggccatggttctctggaacccagcccccagagcacaaagctgcctgcagggagcagcatcacactctgctaaggagaccccagggtggctaagatctgttgggagtggcggccacaagtgacaggaaagagggaaggtggggagagaaggctggttacgtgtctgcatgcctggcacccagcggcaagctgggatgccattagcattcctgcttccagggtgaggaccgtattggccaggacagcacttgctggttgcctggttgccctgttcagacattaatgtgccctcaagtaactgcagatggagccggtgacaacggataggcaccagcctctgctacctcaccatttctgaggccatcaagtgcatctggatggctgcttgtagaaggccttcctgtcctgtccccaagttgcccagtcacaacagttcaggtgtgcttgctgaagactaaccccttcccacctgaagctagtagactcgagcacgtctctggaagcctatcaaacaagaaacagaaattaatggcaggcagtttggtgtggctgtagcagaagaaaaaagatgagacaggagatctagccagggaccagatcctggagtagccaatgagcctcacccaggagtctgggctctctcttaaaggaggtgggagccacgcagaatgctaggcaggggaaagacaggtgagacttgcatttcataaaggatcccttcagcactggtgcagatgatggatgggagatgagctcagagaagggaggctggctgggagaccgctgccatactccaggtgggagatggtgggcttgcatctgctgcttcttcctgctctctgaagatggccagagatcagaaagcaagggaaggaccctcagttttatcctgacattcatccctgccacgttgacatagagagcaggggaggggctgaaaaaatagctcccattccccagacagtgcctgagatcatctggaggagacaccagctgggtttggttggactcacagggaggccacatggggcaggggaggtttcagaactaacagagctggctggagccatgctccagcacttaccagtgagcaactcttaggcttctctgagctttggtttcctcatttataaaacgttgattctaacggtaagaccctcctcacatgattcatatgaaaagcaaatgagccaacacatgggcaaaagtgcccagaatgaagtacctaataagggtgagttcaataaatagaaacaaaataccaaattctacccccctcgtttttttctttttcagatatgaaagtggagatgcagagaggtggagtgagctctccagggtgatataatgagctattaggttgcatacttcccaggttagcacgtagccaacagtgacatggactggaaatgtgaggccagtcaggaagaccagccaggtggctgtcatgggagaggccaaggaaccagagagcttgggaatggagaggaaatgatgaatcagagacattccaagaagagacagtggtgctaagtgacagagtgggtcaagcagaggaagagggcaaggatgaccccagtgtcttttgtgggatataatggacaaagagacatgtctgtatcagagtagggtgatgacaaaggaagcctattaagtcacaggtgataatggtacatttctggacttactgtgttcgaggtgacaaggttctaaagtgaagaggacttggatgatcatgtgagaaggagttctaggctgaagaaatatttttaaccagttgcgttgacctcagagggtaaacattttgttgggggaaacagcagttggatcctgtgggtagactctgctacaagcattaatcctacccctctggaaccaggacacattaataaatgtgactggtgtaaagtccaaggcacagacactcgcaaagaggccactaagtgctgggcactatgtgcaagagaaaaaaatagtaggcaaacttcctagcccaaagatactataatccagttggctatacaagacatatacttaagaaaaggtaactaaaagtcagagacaggtaatagttcggtaaagaaagtcttgaggcagcacgcaagttatttctgcatgaatggcaattcttactgcaggagtccccaggaggaaaagacagcttcaggctgtgggatggtgagggaggtccttgcaaaaggccttgaaagctggagattgtccctagttttgtcttagttttggatgtctaccaatggccctctcattggtttttgtctatcaatagccatcagtagccattctgcccagcgatgccattctgattgcagaatgatggggtcttctgtttggaaagttttcactttgattctgctaaactgctttctgcatcggttctgcctactcctattttcagcataattactcatatcccaggcaataataatgcccatacatcatgcaaagatcataattttctgatcaacctctatcataaagaggactgaagagtggagtagcaaaggtatattaatcctgactagtgcctggccctggacctccaggacgagtgataaatgtttaattagcccaataatacctgttttataatttttggatctcattgcttgctaattctaagtttactaaataactataaactttacgttgttgtaaagacataattgcttcttcattgcttatttcatatgagttaattatactagaactaagtttttccccattcatattatcaattagttgttttaaactattgatttgtatttaattaactatgctattacataccaattaaattcatataagaggaatctgaaacagctgtggtcttaaattacgtttttgaaataatgagttctataacatttcatgtcaagttattgtcagttaggaagagttgacaatcatttgtgataattccaaaaacttgttgtgacccgccagcccatctcaccagctccagcaggcagcaagcctccctcacacacctgctgatcacgtgccgatcagcaccttacagcttggtaagcagtggcagtgcctaacactgggataaccctttgccagccctgccttctccagcctgctccagccatgccattatttggctggcatagctctatcccccatgcggccaaggcaggcattatcagcaactcctcaccaccagctgtggggtctagaattatctgtgctgctatgtctcagatcctgtgtgcctgcaggaaatctacatgcccatgtggtcatctatccttcggcttctccaaatctctgctcactggcttaagtctgtacatctcaggtgggaaaaaagacagcagtcatttgctgagctgcaagggacatttaacttttctcatctcgtttcaccctcacaacacctttatgatcacaggtgttattctccttgttgttatttagcgagagattgacactttagaggagtgaggagtttgtcctgagtcccacagctggcaaatggtgaggcttgccgtacacctccatgttggtgcttgttggtgcgtcgtgccatgctctgtctccattctctgtgagattcgactcccaaccaattcggagtctcagccctttgggctggctttttgataccttgcctagctcttatcatctttctctccttggagggctgggttcctcccctaccctcagacactgcctgggatctttctcccaactgatgaattgcctggaattctgacacagccatcagctttctctggggcacttggccatcaacatgggacccaaggttggcagagctcaccccactcctctgtacactgaaagtgggacactggttactatctttgggggctgggtgcagcccagccttgcccctctcccttggccagcatcaccaagtgtctgccacctgggaccaggctcatgtagttcaccatcacaatgaaagctgccatgtgctgattgcttatgcttcattagtctctgggctgagcactttgcatgccttaccttctttattcctcatcaaaactctataaggtaagtgctgttattattcctatttgacagaagggaaaccgaggatccaaaaggttacaaaacttccccaaggtcacattgctagtaagtgctgaggttagtaaagctaatcatgaatgagattctttggacttccagtataatccgtttgtgagaggggtggggcggggggatgttaaataatgttggttaaagaattttacgggaaacagttttatcccatgtgcaaggatgcctcagcccgtctctgatttaacgtatctaattccaatgagttacttgctaggtgggggaacagagaaataggatcatgaaggccattcctgtcctccagtctgtcttccacacaccctgtgaggaacaggggctgccaaaagccatatgcctgagggctgttagacttttcctaacagaaagttggaagtcgtgactagtgtttgaatggggccagatgctcgacagctatgtgtcctacccctggggaggctcagcctggtccattcagtccatcatggctgggaggccaggcaggaaaaggcatttctgctttccttatttctagaaggaccaagagttcccaaaagactaagactgaaggcaataaggaggcaggcaaagtcccagcctgcctccaagtattcccttccccagcccctacagttctcttgaggccaagatctttgcaaagccagaggcccaataacaggttatacatacaagactgatttgtgaaattagtctttgcccagattagtgaatgtgtggattattagctttgctgtacaggtgaggctcagggaagccaagcaattttcctaaagtcacacaactgggaaatggacgacccaggattagaacccaggcccatttggttccagagcccaggcttgctgtgcccttcttccaggatgtggtcccaatgtcatgcacacagcccagctgaccagcagagaccccagtgggaagaggggaccccccccccgccaagcaggtgctgctgatggagtcacaggcatcactgtcaggtggtcaggagcactgagaagcccttgtgggagtgaggctcctggagagcccctttctcagggactggagaggcagggaggtggggtgaggtggggaagcgtggagaatgcctgcctactcagggtgtgcaggcagcaggggcggggctgctatttagtgatgggcttacaaaccttcttgtcacctatttatggcccacataaaactctgatcactgaggattaactgaagagggtcctagcagggccacacgctgactttaaagaattgatcactggagtcaggcagtcatgtccagcccctgccctcaagcccctcacatgctgccgaatgagtaggggtagggggagatgtctgctctcacttggcacaagggaagggggcagagagaagaacaaaatgtcctgcgagtggggagtgcagggtttttaggggtggagatgtgtgggctaaggtccagtgggctgggaatgccccctccacattctgggtggaaaagcggcacaggagggaggccaggggacagcacgtccttgcccccagccaagtcacagtcacagctgcctggttcacagtccagtgggcatgcgttgcctcgcggggtgggtcctgttcacccaggaatgctgcgcaccttcactggggtggaaggagggagggctctccagctctccttgctgtctctcctccctcacacgtttccgcagagaggactgtcctctagggcattgtaacttgggccaccttgggagctgaggctggtgaggagcagaggatgaggaactggtgagatctccccaacagcagagccaagcccaggcagctacccgcttcccccacccaccccagcccacacagcaaggagggaaagtaggcggtggggttaggagaggacccagcggaaaaggcagggaaccccgctgtcctcccattactgaaatcctccttgagccttacataccccattacgacgctgtatcctataattaaattgaatctgccagttacctctcagcacggcagcaattcaaactcattggaggctttgtttattttcatttatttatttatttagtaattatttatctagctatccagagagctagatggaggccctagcccaatgtttcttttgtcttcaaaaacaagaaagctcaaatgcagtctctcccacttcaggtcaagagaggaaaggaataacagagaccacagggtggcagcagatccgcggggggacctcttgctggggggatatcgctgggacagggttaaggtcaagattgcaggggaagttttgtctgcctgccagtcatggtctggaccctgctcctgattctacccattctattcttgtcagagatactttatggaaagtccacacattccagaaagctccatggaagccccttacaggccccagacaaggggcttcattctgagggactagaacatcggttgcggaatgtggaaaccaggttaactgagtattattggcaactaacacacctgcagagctttgcagttgaagaagtaaatacatgttcttctttaaccctaaacatttatggaggacactgaggatgagagaggttccacaacctcccttgctcaaaatcaccctgctgctaatggcagggctaggatttgaccacaacgcttggggtaaaaccaaactcccccacctccttcagagccccatatccaagctggtggcccagcaacaaaaatcaaagctcttttcttctctttaatgataacctttcagcagtgagtgggcaaaggagagcatgatggctttgagtatggaatcaacctcaaacaggtccaggggagcgattctgagccaccagccatcactcaataagaacatgaaagtttatttaccacgaggccagcccagtgggaggcagattgctactattagcatgccaaggactgcacagaccctgcacgtcaatagctgagccccagagaagtgaccccttttggggttatccaatctagcagccccaccagagcaaaggacgagggtggctgggatagtgtgtgcttacatgtgtgcacgcatttggagaaagggaaggaattccagacttgagatggctccttagacttaaatctcccttgaaaagaaaatgctgcttatgaaccacttccacccttgcctacctactcctgccaacccattcatttgtttattgatgagctgcttaatacttcttggaataggaatgaatagtacgagaaaatacctgggtccacactggcaattcctgggtctattctggaacaatcatgcttacaaggttttcggtgcacatgggaggtggggatcagtgtgtctctgggacctatttacccctatgaaccactggggttcttgactcaggctctgtcagtccacagagggtggttatggcaatgtggaggaggccggtggcccagggcctgaactgcaggagaatttatacttcttgttcatctggagaaagttctctggccagaggacacagtgagggagcctggtttaaaaaaaagaggcttaagctaagaagcccggggagtaggaagttctatgctaccctggcttgaagctttggacagtcggggcaggttctctcttggctcctgaggccaagagaagccagcctaggaaggttggaccattgatcccacagccctggggccttctcacagtagtgtgggtgtcacaaccacctcttagctcttgatcagagatatccaccttcagtctcctcaatgtgtacaatggagaggtcttgggctgcaataaggactggagataatgtatgtacaatactgggagggaagggtaaagagagttgtgttcctaaaccctgtctaaatgtatggaaccaaggccggacacattgtaagcccctataaatggtacttacttataaatataatatattattagaaagtacaggggtatgctaaaagtcaggaaaataataagatactctaagattagcctgaggaatccagttctgtagcttgaatagagactgctatgttgttggagttaatacccacagcagctcaaggaacagctttgttcagctctcagaggaaggggctgcctggtggctgtcctggggccgctgttccttctatcagggattctcacacccctctcaagcatcacatttcattcatagttcaagagcccccaagaatctcctctgtgtgtggccttctccacccctacccttgcagatgggcatcccctcctctggacaccaccccccgccaactgccttattcatacctcttcattcattcatacctttgctatgagactcccttatagatgcgaccacggttttgaatttttgctccaaccctcccagactgtgaggtgggaaccatctctattaatctctagaacctggctcagagccaggcacatagtaggcactcagtgcacatgtgtatgtgacgagtaactccacagacagggatgatctactctaatgttcaacagattaatatttgatttagcactgtgtgtcccttcaaaattctgggggccaagatgagggctgaggtctgagatctctgctggtttgagaatgggacttcctcctaccttcatttgtccttccttttacagaactataagtcagcctcaggtatgggtcagctttatgtagttaaccttccagtcattcaggtttttatctttgagtttattctaatttcattcattcattctcattcattcattcattcattcaaggagagctcactctgtgtcagttctggctgttatggatattgtgatgaacaagacagagaagaatttttgccttcccaagcttccattttagacagcttctatgtagttcctttcccttacacgtaatttagaggtaggaagtttcatgtgggtttgggcaaattattaaacatccctggacctcagcatctccatcttcaaaatgctgtcaccaaaccctctctcaggctggcagtgtgccacccaccacagcttggccttgcatggctggtgcttggtaccaccagttggtttgaatgtgggtgcacgtgcatgtatgagttcattaatttgcttcctttcttctcaggcacttagatttttgatgcacactgagagggtcctttttaatcagctgaggagcaagggattcctgagccacaaatgaggctctccctactggaatgcagaaggaaggacaagagatgagcctttactgagatgctgctatctgctgggcactttacacacacacagttatgccatttagtccacactgtaactggggagggagttgttgcttcctgtgcttctcatatgagaaaactgaggctgagagaggctcaagggctcccataactgaagacccgtgccttcgctgctgccactcaacctctgggtgggggatggggtgctcagtccacgtggaaggaagagagaaatagaatgtcacagagctctctttcaataaagggctcagcaaaatgtttgtcttagccgcgtttcctatcgacccggtgtgtggcacatggattaagtatgcagtttggtggtctttaaaggatgaacattttctctaggatcaataagctgagtgagtttgggtctgaattcatcaaaatgtcacctgaaacaaattcagtatcaggacttctgcgctcaggtcaggtcgatgggtgggggcagagacaaaacccagggaataccaggtctctgggaaaaaggtccagggcatctgttggacaaatttgggtctgataactcagagtggggagggggtcctagctggcaaccagcatcctagaaactaaccgctggcctggtacagtggcttatgcttgtaatcccagcactttgggaggccgaggcaggtggatcacctgaggtcaggagatcgagaccagcctggccaatgtggcgaaaccctgtctctactaaaaatacaaaaaaaaaaaaaaaaaagattagcggggcgtggtggcaggtgcctgtaaccccagctattcgggaggctgaggcagaagaatggcttgaacccgggaagcggaggttgcagtgagctgagattgtgccactgcactccagcctaggcaacagagtaagactctgtctcaattaaaaaaaaaaaagacactaaccgtcctttctctggtctagacgtcatccttaccttcagagagaatagctgagtgagaagctgtgtgaaactgcccagttctagattcttcgaacaaaaagtgtttttgaggttaatcagtgccattctcacacccagtgctaaaggattccccctttagcaccttggagaagtagtcacactggtttcccttggatcgttctaaagacagggagctcattactttggaagctgtggttttcatttttggagagtttaaataattttagagttcttctatgttgagcttaaatattccctacagccttgcaactttgcctcattagtcccaaatttgcactgtgaggcaacacagaatgagactaatccctcttccacccaactactgagaagtttaacagacaatcttttcttttccaaaataaacaacccttaggatgtttcggtcctgggatgcttgcagcccaggaaatgctccctccctctcccctccagcttctctgcaaatgcaagactctggcttcattccctggtccttcctcagtatctcacaaagaaagaggagggcaaaatgggaattcattggaagagatccttggttcacacgctaggaaagaaaagggatgatcttggtcttggcgtgaacttccacatgaacgtgactccgtgcctacctgctaataagagcgggagtgtggattgtgcacataggtggggacggggtgagaacttggggtgtggcgtgtccctgtgggtggacacattgtgaacagtaagtatcatgaatgtgtgacagcatgtggggcacgtgggtgagcgtgtatgcatgtacacaggctgtctgctcaggtcctgggggagggactcagaatccgcctcacacccatggagagttctcgcaatgggtatggcaaacttcctgaccaacaggcttctggacttctgactcagcaccagtcctgctccttctgtctcaatgactgtcccctgtccctggagatgtaaaagttccaggctctcctaccacacctaggctggacttactgattccaaggtgaaaataagccatcacgtattgaccatctgtcagcaagtatctaccctgcaaaatacttttcacacactctctcacttatcctcaccatgcctagagatgggactttgtctccatgtgacttatgaagacactgaggaccagcaaggcgagacaactgtttgaggccacacagcaacagaaccagacctcgatcaaacccaaagcccgtgctctgtccgtgtgctgcctccgagaagccatggccaagaaaggtctttgcaccagagctcaccaatgtctcggagaggtcctcccttcctgccagccattgatgatcctggaggatgaacgggtcgtctaaaacagatgacgctggtgcgggccccagggagttccaccaagagccttaggatttatcatgtgggagggtagttagttcccaaacgcaggtgagtataaaatccaatttcttaaattgcatccagggccaaggggtgcaagctgctctgtcagttatgacttcctcgggtacctgagactgtagctcctcatttcctaaatcctcctgcttgttgtctgagcttttagccctctgatttacttattagatttctactgtgccttttctctgcagagtgctcagtgtccccaggaaccactctctaatttaacgaataacttctctcatgagcaaatggggtccgggttcatgcaagaagccagtggaagaggagaactggggagacagagagtgagaaaaggggcagaaaaaacagggcagggtacaaaggaggcaaatgcaccacctgtggccctagagtggggagcattgaggttggatggcatttgtatctagagttgcacctggatctggacaatgcttccaggttaccactgctggtaagcaatgtgcccaaccaccctctctgctctcatgaccccctgcctctctccacctctgcgtgatgtttttctgttcgcctgtctgtctccttgaattgtgaggtccttaaaagagggagccaagtcattttttttttttgaggcagagtcttgctctgtcacccaggctggagtgcagtggcacaatcttggctcactggaagctccacctcctggattcacgccattctcctgcctcagcctcccgagtagctgggactataggcgcccgccaccatgccaagctaattttttgtatttttagtagagacggggtttcaccgtgttagccaggatggtctcgatctcctgacctcgtgatccacccacctctgcctcccaaagtgctgggattacaggcgtgagccaccacacctggcccccagtcatcttttaacacctggcacttgtcactgtgtctggtccacagtaggaatttaacacatacttgctggagaggccagttacggggcacagctgaaagcataaagatgcactgtataacatttcagcccccagaggacccacagttggggagacaaaggatagccaaagacaccatggctgggctggccagggaggtcttcgtggaggaggctggactatactgggccacctagaatgctggggactggtgaaccggacagcaggaggacattctaggaggaggaatggcttgagccaagggttcaggttgcgatgggcaagggggtccctgagtggaaggcaggacctgtgcagggaagtctagaaaggtcagtggaggcataccgtggagggctttgagcacagagggtggagcctggaatttcttctcctgtgatggagcctctagttcgccctggcccagccccatgtgctgtctggcacatttgtgcactgccctcctgcaggagggggcctggcacagtttctgtgcaccctggacaagcagggccacgtgtgggccaggactgctctgccctgtcttctcctctgattcaggaaggaagaacttgccctggactctgtctgtctaaaataacctcccctccccatccccacatggccctacctgttcccggaatttcctgttttttttttttttttcttccttgactttacagtctccgggttgcacttgaatctcaatggcatcatcccctttcagtctttgcatgtgcttcataaagaaatgactcttttgtgcagatccactgcctatggtgaagtaggtgctcatgtaaatgccaggtcctagctctggaaagggttagacagcccttctcaaaccatgcctgcaatgccagtttaaagaacatggaggcaggacagcagccatgggaatgaagggtggcagataaaatcagtgccccagaagctctggggcctcctctcattgattaaattttcaaatataattttgctatagttagtggggggtttagagctggtcacattatattgaatttttttttgagacagagtctcactctgttgcccaggctggagtgcagtggtgcaatctcagctcactgcaacctctacctcctgggttcaagtgattttcccacctcagcctcctgagtagctggggttacaggcacccgccatcatgcctggctaatttttgtatttttgtagagacagggtttcaccttgttgaccaggctggtcataaactcctgacctcaggtgatctgccctcctcagcctcccaaagtgctgggattataggcgtgagacaccgcgcctggcctatattcaattttaaaactttcatttatttttaaaattgaaactaaaagttgtagatctatttatggtatacaagacattttgataaaagcatacattgtggaatgaatacatcaatgaattaacatatccattacctcacatatgtatcattttttttttgtgcatggtgagaacatttaaaacctattctctgagcaatttccaattataggatacactgttattaactgtaatcaccatgtcctgtaatagacaggagtctcctcttgaaccagggttatgtctcagaaccagagtaggaggagaagcacctcacacacgagaggctctgctgtcctgacgtggcacggaagggaatggaagggacaaggggaaggtgctggaaaggggccagctatgaactgagcacaggtaacagaccacacctgacctcctggatccctagttacacaagggcatgtattcattgttccattccacagatgggaaaacagagactcctggggcttaagcagcctgcccagggtcacacggctatgtgacagaagggctggaacctagatcctcccaccccaaagccaggctcctccctgtgatctggccctggttttgcctgtgtgattcctctggccttactgggtgatactgagccaatcgtggagcctctctgggcttttgtcttctcatctctcaagcgaggggcatactctcaactgagcattctttgcatggcctgtcctctcagtcaggccagaccaggaccagctcctgccattgtgcattgcaaggatgcactgcttgctagtgggcctgagattcaccagtggcaacacagaggtgccttcaccagccttgctaagctctggtttgtgtttctgcctctggtgtttggtatcagaacgcattcccctgatgctgccggaagcaataatccagacacggttcgggggtttagtggaaatcctctgctatagcggaagaaaatgaaacccagtgaagcaaggatttcggcagatgcaaaaatctgcccatttacctccccagtctgaattccacggcagggacagctgagaagcaggcggatggatgaccttagctgcaggtcaggtggggaaggggtgagaactgagttcagaagactggggcttctgcaggtctaaagccccatgaggatgggaggggaaggtcaccgagtatttgcaaacatgttgtaagatcaggattgaccttaattgagtgctgactgttaaaggccagtgcttcgtgcagcaacatattttccttttaagcccttgcaacactgacgtattgaagaagtactaaagaagtattatccttaattatctgatgcactgaagaagtattatccttaattatctgaggtactgaagaagtattatccttaatattggtatgagggcttagatagcctaagtgacttgcccaaagctacacagtcagtaaatggcagagcacagcagaaatgctcactgctaacagatggacactgctatctgttcttgatactcagaccctcccatctctcccatccacaccagttacccaccatcatggaaacatgtggttccggatgtggacagctggctccccgggccccatacctcctgtgtgctcctggagccttctccatctgacacaccatgtcagatgtggtcctggaccttcctgctatcctcagctcactgtggactgtttctgagccaagggtattgtgtggttaccagggaaaatatgcccccgctctaggcctgccagcagctctagggcaataagccatctttctaaaatgagatttcctatttcagggactctgaaatctccagttctgccaaacagcaggtcttctcctcagcttaagatagctgggatcatggctgaggttgagctggtcacagaccatcccccactgaaccaatgataacaccctgccaagggcctcagcacgagcaccaggagcttctctgttcacatatttacatatcaagatagaaaatgaatatacgaaggagtctagcatgaggaggacgggatgcgctgtggagttagacacacttaggttcaaatcccagcgttgtcacttattaattgtgggaccccgggcaagacatttaactcctctgtgagcctgcttccttctttgtaaaatgcaaagaatgatcccatctacctcgaggagctgctatggggataaaggagagcaagccctcagtacggtgcctggcacgcagcgaggactccctaaatggaggctcctgctgtcacgaccctcgcccggggaaatgcctgtcttctccatttagaaagtgacagctgacggcaggcccgaggcagccaggtagggaggctgcctgtgtgcaacccgctgtggaggctgctggtggctgcaggctttcagaaggcattacaggccattgttttaatcaatactatattatttcctccgcggcaactatccccatgtttattatgtgtaaatagggtttttcaatgatgtgaatgtgttagcttaacgtagctgacattcagcgtgcacaatctggtggctgcccctcaggacttccaggaaaatgagatgatgtatccgtcacaaagccatcctcgtgagtaaaatttgagcagtggcagcagccagggcacccgatgaattctgcaggcgtgggctgcgtgcttgagaaggaaaacagacatcaacatagcctgggagcacagtctgcaggcagtgtggacagttggtgccccggaattagggcgttggcgttcccatctctttgctgccatatctagatcctatacagcttattccaacacctctccattgcctggcgagcgcctgtggatgcactcttctgcctactcctggaacttgtcaaggtttgccctctctgactgtagctcctcactctcctggactctaggatgggcccctttcttccccatacaaagcccccagtagtctgaaaactcatttttgtctatgctcctcagttcagcccaggcatgtgggtatgaccgagcctggctgcaaaggcaggcagaggggagcaaaggtggtctttctcaatgtcccatgtgggcttaactttcctcctcctgtaccagggcactcagagtaacaccaccaatgacactaccagcttctctctggtgtctaactggactgaaggtgaagcaggtggggtgtcgtttagatctggggcagagcttccccactgtgacacccttgaagttgcaggccagatgccactaccacacatgggtcactgtcaacaggccacaaccccaatgatgggcacttaactcaataataccagatatcagacaactgtggcttcatctgtagagctctctggagtgcatcataaaggaagtaacctttttcttttttctttgcttttctttttttttttattttgagacagagtctcactctgtcgcccaggctggagtgcagtggcgcaatctcggctcactgcaagctccgcctcccgggtttacgccattctcctgcctcagcctccggagcagctgggactaacaggcgcccgccaccacgcccggctaattttttgtatttttagtagggacggggtttcatcttgttagccaggatggtctcgatctcctgacctcgcgatccgtcagccttggccttccaaagtgctgggattacaggcgtgagccaccgcgcccggcctctttttttttttttttttttttttttttgagatagagtctctgttagccaggctggggtgcaatggtgcaatggcgagatctcggctcactgcaacctctgcctccctgattcaagtgattcttttgccacagcctccccagtagctgggattactggcactcaccaccacgcccggctacattttgtattttcagtagagatgggttttcaacctgcgggccaggctgctctcgaattcctgacctcgtgtgatccgcccgcctcagcctcccaaagtgttggaatcacaggcatgagccaccgcgcccggccaggaattaaccttcaccaggatagtttgtggaattttatcaagaggcttcgctcccatctcctgctttcttaacagagtttggaagcagcggaccggataggaaaactgcttagggttccaccctcatgccaagtggcagaggccccgggggaagcctcctgcggaacgtgggaacaaagggatgcggggcctagcactctacgccggtgtctgttcgtctgtccagaaggcttgtcacactctgggggggcatctagctaaaaggtactccatcaatgtaaacgaccgtcgctctcgttaagttccatctgtgtgtcttaaagctcccgcacggaacgtgattggagttgggcttcagcttccctgtgctgcctgagacagaggagggagatgtttttcttggcaaataaatatgatatcataagccctggcaggattccagcctgagtaatggccgtctgccttcctaattccctcagcagcttggaacaggaacattactctttacttcctctctttaaaaacaaactctctattggagcgcattactcagccacaggatccctccccggacgtggcggcattcagatgatgggaggtgaggaatgagctcagattacagcgcacattagggaaaacacagcaaggcatttggcccagaaaaggcacctgaggaccttgaattagagcggccactcctcatgtgtccttgttcatgaggaacatagagctaaaatcaataaaaatcacattgtttagcgctgccgtttccctggtttaaatcatgaaggagtaagtaggtaattaggtaatccagctcggactggatagttaccttcaagtacgaagcggtcttgctgagaccctctcactgaacgcgagctgggggaagggtctcgtggcctctctactcacaggagcactgctgcctctaagcacataccccgccctctttctgcttgtcattagttcttcctaacaacagttagaggcatcggtgttgttactttccattttataaacccgaggctcagtgagactaattaggtaactcgttcagggccataaattatacatagcagaagtcagagttgaactcgggtcttttggcttcagattcaatgtttacaacgccacatcaagcctcatcactttctctggcctgtgaggacttgggtgctgccacttgtcccttttgaagtagcggatacaaggtggcaccgtgaaggcactgggtcaggagctgggacacagctttgcatcacttgggcactgttctgctggggcctccttggtaaccaaccatccaggtgaggataaaaactgacccagcttgtagagagatcttgaggcaggcatgcagcaagggccctaaaattactgggagaagggcaagtcactgttcgaaggcttgggatggtgaattcagccaataaacgtcctttgaacacttactatggctaagcatgggggcacaactgtaaaccagagagagtccctgcctcagggagctgggagtcagtgggagagatgaataaacaggcaacgacgatgcagtgtgatggatgctccagtggaagagtccagagcaccgggatgatgtgtagggagagccactcaccagacatggcagttcttggaaaatgtccactggggacatgacatccaagctgaaacccgaaggacaaataggggacagggagatgaagacgggggctgcagagcgttccaggctgtggaggcagcgtgtgcaaaggctgggaggtcagaaagaacacactctgctccggtgatggcatgtttggtctggcctggagcagagctgcaggggaagctgtgaggcatgaggcagagaggtaagccaggagtagtttgcagacccctggctgggcagctttccaatctggaacagtgggtcatggagccatcacattcccaaacccacagcgcttccctctcaccaaccctgtagcctgcagtcttcactgtgctctcgactcccccagcctttcattgtatgtggaagaggagccagaaatgcacccaaactgaaagaggagcacgcagcaccaatccctgaatcaaaataaaaatccggctgcactttatctcgctgaaggactgtaatctgggagatattcatttaacatatttctgtctctgaatggcttttacttttcactaaattgaaaccgcagtacaatatatgtgaatgattaggttgtgtaatacattccagcaaatttagattaggaatgattatgacttaagtaaaatagttgaacacaattcttattgccatctatcttttcacttctttttagttttcatgagagtgagtgaatgcaaggaatgaatgactctaaggagagctgggccctggtacagggaggggcagaggtctgtctttggaaggctttaggaagaagggagaggtggactggaagactcagatctagggctcgggggaaagcattgggccatgaggtagattggggacaagtcctatatctgccgtttgctagctgtgtgacctcaggcaagttacttaaactctctagtcttagtttcccatcagcaaaatgggctttattgttccccggctcatggaatcattgtgggacacaatgagatcagggacatgagagtaacactggccaagagctcagatggggagtcaaagtcctgatcaaagtctggctctatcacttattagagctgtgtggccttgccctttgatactcagcttctctgagccccagtttcctaatccacaaaatgggaataagtgtactcagccacaggtatccttgaagagaggcttaaataggatttttttgcatgttaatagtgctttgcaaaatgcaagttacctgggagggctatgctggctgataggggtgggaataggaattggggactcccctttcctgggatagcgacctggaggggtttgggtggagccttgctgcgggccctgaggcagggaggggaaggagaggaggagtccttgccaaaatttccctttggagtcctaagccttgcacgcgccctgggcactccaatcctcctcactccactgctctattttccccatagcattgaacatgctgtaacattctatataatttaccaatttattatgcttttgtttagaatctgtttccctggttcaaaggtaaggcctacaagggcagggagctgtttaatcccctgataaatcccaagcacctagagcacagcttggcagttaggaggcatgctcaggaaatatacgtcaaatgaatggatttatgagtagggctggaattctgtctcctgagaacaagtgagctgaggtgggaagaaggtggcggtggtggggggaccaggggagacgagggcatcagtcactccagcagggagcttgctgcagggagaaagagagaacagcaatttgggccgtgaagcctggcactcattcttcaagggggctgcaagcccccaggattttcctggaacccagggcacccgcacactagctgcctctcccggtcccttccagcaacctgaggaaatgccttccaatcagagcaattactgctgccctggagccgctgcctctccaggtgtctgcctcctgcggctctggctggagacaatatttctcctctgttcatcacgagaacagggacaacaaataacacaatggcagatgaagggccctccaagccctccagagctgaaagagtctgggctgttggcagcgtctgcgtgcaggggaacagaagctacaacctgcgtggggtgtggggatgactgactcttcctggatgggggcactgtggccagctttgtccgggaactgtgctgctcctggtccaggcaggcagggctgtggcagccgccctccgcccgcccaccagcaggcagggactcagggcaccatgggcttgggaaactgagagagagctatgtgtgtcagttgtcttgttaagttttttccccttggtcttaaccatgtaggtactcttgtgttcaaaggaggaaatggaatctcagagaggctgagtcactggtgcatagtaacacagctcatcacacagcagtgctgggataagtgctcccatgtttctgaacccaaagcacatctcgtcgctctggcactgagtgatccgtgacacagatgtacctatagggcgtgagtgcagccccttacctctcagcctcagtttccctactagtgcaccagtcactgaagcttgggaggtgtgtcagtgactcaacccactttatcctgccacctcacctgaccttgctggcatttcatccctgcctcctggggctggggctggatcttgcctagtgccccagctgctggctgaggctctactcagttactcctgaacgctcctctttctactgtgccccatccttaggagcaggggctccctctgaataccagccagggccactgcagcagaacatgccacagtcctttgaaagctgatctcaacaccagtatggatactaactctggctttcattgttgagcatttgttgagctcaaatgtaaacccaggaaccagattctgagggctgcatacctaaccattatacaggcctgcctcttcctcatttgacatggtcttttgaccttaactaccttggttattcgttttgttaataccccctttcaaattgatttctagaactgaacccaaaattccagatgtagcctgatcaagcaaagcctagaagaagaacatcacctccctctgttttaaaaattgctttgcaattaatgcagtctaagattacacccactttcctgggcccccagctcccagagtcgactcctatggggctcttcagccagccctgtctacagggctctgccttaaatccctaagtcttctagaaactagctgctgtggcagaccttttgtgtggctgagatctgcaacaccccagcggtccccacctcaagggctgtgtctgccgtggctgcatgcggccctgctgtggctcactgtggacacagcagacgaaagagaacatggtctcagctaagtggggggctggaaggaggagaaatggtctgtgaaggtcactgccactgtacggtgagtgatctgtccccatttcagcctcagtgggagagtgatggagggtgtaattagggcttgagctgtgcctgtgggggctgctgcaccaggctcaaggaggctggggacacagctggtagtctctgccctcctagataccttggtagcgggagccgcccttcttgggaccactccctcgctggccatcccagccaggtcttccatccctgttctccccaccccttctctcctcaaaatttgtcctgtatgtctcatttcacccattctcttgaggatttgccttattagaaagtgatctggctgggtgcggtggctcacacctataatcccagcactttgggaggccgctgaggcgggcagatcacttgagcccaggagtttgagaccagcctgggttacacggtaaaattacgtctctactaaaaatacaaaaattagctgggcacggtggtgtgtgcctgtagtcccagctccttgggagtctgaggcaggaggatcgcttgagcccgggtggaggaggttgcagtgagccgttattggaccactgtactccagcctgggtgacagagggagatcctgtctctcccacacctgcaccccaaaagtgatctgattcaaatgctgtattaagatgttaacatctaacgactggctggacgcttgtaaccaggtgtattccacaggtaacaatccttcaccaagagaatcccttaacctaaaggcatacatcccttagggtgaaatcctgtgtgttctggtgggaggtttgtgcaaggttggccccggctggttataacagccagggcattactgcacatgtaacctgcacttcccagtgatgaggaaatggcagctcagagggcttctacatcttgcccaagatctcagacatgctcttcctgtccagccttgtgtataccagccatgctctgccttgcacctggacctgaggtcagctctgggggccccatcagggtggtagtgcttctagaaggatctggctgttcagagaaagctctctgtcctgaaggcctgaactgggtgaggaacaggagcactataaatattgctacaatttcttcatcacctgccatgtcctagatactaagttaggctctttacagctcataccgtgttgtcatacgtatgaccatgctctgttttaccagtaaggaaactgaagttcagaaagtttaagtaacttacacttggccactaagcaggaagtcctggcagggggaaaggcaggcctgagtcagcctgcctttgggccctctcaccacccctggagcccaagcaacataggcctctcatagggccaacagctcccacccctatcacatccttcagggtgcagtgccacggctgggggtcgcttgcctttggactctccagagaggagtccctgggacagctgaggccttgctcacagccctaggtgggccaggaaataacattccagggccttttgtcgagcccctgggatggggacttgcatgtgctgggtgcctatgatgcctcaggccttgttctaggtactttccgaacagttattgtcgtaatccttataacaacaccataacttaatccttataacaacacaatactataaaggtatcattgttccctttatatggatgagaaatactatgtcttaatccctataatactatgtcttattatacaatgctaggtctgaatccttataacaacacagtactataaaggtaccattgttccctttatatggaggagaaaagcaaggccaagggaagtctaaagttacatagctaagaaagtggaaggagctgagatctgacagtttccagcgattccaaactcaggctctttctcctacaccctgtagcttctccaagaagattggggtctaaaggggcagagctttctccaggagcttctggtccattgagggagatggaatacatcaggatggaaaggaccatggcaaaaaacccacacagtacactctgcatgcctgctgtgcgggaaacagcgcgcctggggccagagggaagggaggagggagccagggtggggagcccaggaggcacatcaggggaggccttggggaagatgtgagtttggcaccagtcgcaggtaaggcctttttctgtgtgctctgggaagagaaagctattgagctgggtgtggtcacagcagggaagggctgggagcaagacactctcagctcaggcagaaaaggcctgttgttgagagaaccgatgcaggctgccgctgggagcagagggctgggcgtggcgtacctttctttcctgtgagggggctaggagctggctggggtgggagggctgaggggagcaggcacatggtccagccacgttaggaggcttgcacaaagggcttctaggcctgaagcctccagctcccaccccgtcagccgacttgcagattgtctgaatgggtctccaataggaaaaaagccagggctttggagaaacagatgcttaccacggaaccaggatgctgtcgtctgcaggtcacccctgtgtggatacagaccgtgggccaggaggctcttcagagcagttctcccacagctcatcctgtaattgactgactcatcggtcactgcttgcgcgctcagccattgttaactggtgacttgaaaattacctttatttagcaccgttatcgggaggcttcaggggcgccagcatttccacgccaccagctctctctggctgatggcagcaagcagcctcatcacactgtccccagctctaagccacagccactccctacccactgtggggaccagggaggggccctcgtgctaagtggatgcagtaggcaggccagtacctcccaacctgctgtgaccccctctgggtacaggtgggcaatgaacacccggctggacctgtggcctgctgtctgttctcctctgacttgcttgtctgctgatcatttctccatagccacgttgccctgtatgcatgagacaatctggaatgggggtcatccatggggtctgggcctgcacggagtggagttaattgcagaacttgtgcaattccttaattctgagtgaacgtgcatataagccttagggagagagaacattcatagcttttagtagattctcaagaggatttgtgagccctaggaagctgggaagccaggttctgagtcatggttctcagatcacccctccaggaagctgctcaggttagcccattgcaccgttgccatcactgcgagactcagggggtccagtggtgcaatacaactgtccccctccacccagagggcaaggccaggtctgtactctgctcagtggtggatgcagatgacaaatcacaaagagagaacaaagagatgacatttgcagaaactcctgcctttcactttctgctttattggggaaaagaaatcacatccccaggctcccttccctctgtccattggcacagtgtatcctcctcccatcctccacccctccctcctggtcacaggttctgccctgagatctgaagtaagctgtgggactcatctacctggagaagaaggcaggcagaagaggaagggagggaaggatggaggagctggtgaaaactaacagtaaggtgaagggtagggctgggggctgggtcggagccacaggattcatggcgtactgtgatttttttgttgttgctatggtcctttctacctggatgaattccatctccctcactggaccagaagctcctcgaggaaactctgcgccctttagactccaatcttcttggagaagctacagggtgtaggagaaagaacatgagtttggaatcgctggaaactgtcaaatctcagctccttccacttttttcgctgtgtaactttagaattcctttagcctcgtttttccttctttctttccacatagcatggggccttcaactgctggagggtctgggcggtcatttatccttgctgggcctcagaggcctcatgagtggtgcctttaagagtgcaatgaggccgcagcagaaactatctctaaggccagctcttaaattctctaacccatgctcctggccaactctcctctgtccagccgcaggtcctcatagaaaggcagagacactgaatagaacatagaaggggttgttttcctaaagctcatataaaattctgaagcctcagcgatggaacctgcatttgggagctgctcgatcttttctgttagcatttccgccacgtgcttctcagcgttttgccccagttggccttccgcccctgggagggggaacaatgtctcctggtgaaagtcactttgcagctgccctgggccctcggaccctcaggggccttctgggttgtgaggcgtggggcaccccgtcctgagcgtgccctgaagatgggcacagagctcccccagctgccgtggcactgtttccatgcagctgtggggatggtgacaaggcctgagggctgtcagcccggctgagagcactcaagagccacttcaccggccttcttttctctttccaaggctcttaacccacttgtggagggggtggcgggtgaggggctgaagagggtggatgtccactttgggcagacaaaggagctgcagtcagcctcctctccagcctggctctggagaaatgcagtcagcctcccctccagcctggctccagagatccggagctgagggcagtgtaggagctggcagggcccttggcaaagtggagcccagcaggctagttgtcccaggtttatcgcccaggattggggggctctgtgtggctcctgtcttagctgatgactcagatcttggactatttctcccttatcaaggtcttcctcatcctaaacttggccttgatttgagcctctttagtttaccaagtgtttacctgaattatctcatttaatttcacagcaaccggtaagggatgcattgtgagcatcatcttactgaggactcagtggctatgactcaggactgtgtcctttgcctaaggaaggccacacagctagtcagtggcagagataggactagaatgagttctttttctcccagggagacccagtggccagaaggcacctgcagccaggccacaccgcccccttaggagcgatgggggacagcaagaactgacaagccctgatggcatacaaagcctccaggtgaccagcagtgacagacgccagccaggacatcctttccagaaccttctctagctctgctggcataagcagcacctggttttcaaaggctttctttggtgtgtgtctatggtcataaagaattgtaataaacaatgattaagggtcacaatataggctggtgctgtgtttcctcccttaggagcagaggaaagtggttgaggtctccaagcaggtggggagcccttggcccctaggaaggcaggaaagtctcccaggataaatctgtctgttctaggctctggtgaacccaacggaaagccctacgagcctggctggtggctgagctgccttctccataggctgttcaccaatctcgagagtcacctgccatgaagtcccaggagttctgacatccagtgttcatgcccatggagcaaccaacaagaatgttctgttcactgccgcatccttagatctaacacagcacctggcatatggtagatgttgagtacattgtcaaacaaacgtaagtgaaaggaaacctacaagatcatcatctgcagataagtcacaaattattagccctatttttagaggtggtagtgaggcccagagaggtaaagtaacatgcccaatgtcacacagccagttagtgagggaagtgccagactctaggtctcctttcactatactctgtcccttctgaaggggggaaggtaggaatgtgatgacctcggccccagggccaagatatgttcttgccatgtttcttagctgcattgagttgacagtgatctgatgtggctaggtaatgaagagatggtttttctctgggaagtgactctgctccctgacttctggcaggcatgcgggagtggggaggaggtatctctgtgtggagctctacattctgtcttaggagcacaaagctcttcacagctcacctacgcatcttgagcccagctttcttcttccaggaagggggaatgaaagcaactattaataaggtaataagaactgaatcaaccatccagcctggtcttccagaagagtttgatggcctctagccttgggcaagagagacagagcccgggctgcagtttcctggcctaaaggatgagtgtctgcagatccatctaccagtttctagaatctttaaagcagcaggaggaagcaggatggggcattatatgggctctagtctctttacaaagtcattcagaggaaaacagggacctaggagaattttggagtgtggtagccagacagacctctcagaaattcccttgatttacactagccatcaccaaaatccctgtgtctccattctctccctttggagggccgttcccagcacgagttacccagaactacccacccaatcagagcccttggctctctgtggcagggggccctctctggtcaagagcagcctcgctggtcctggagcctgggccagagcccgcctgtcactctgcagctccgcaatgtcgggacaccaaagggcagtgccagtagcccgctgcaagctgacaaggctgagttcacatcagtgctgaggagtcgacaggaccatctgaattaagtggccaagtttagtttttaattaagtccccgtggtcttttaaaaaggtcactgacgacaccatcttctttaaggccaatatgaaaagacattcaaagtcaaagttctgagatgggagccttgtaacttgaaatgtcacaggaagaaatttggaaacagggaaagaggaagctggtgggaaggacaaccctgtcacattcttttgccgtcagcttcacagttcccacttggagctccaaactatttcggtctcaaagggcaagtggtcccaaggttctctcgagtgccttccccgacagaggattgtggagcctcttgtttgctgtgccagtgaaaaacagagcccttgtggtccctgacacggaataaaagttgatagcaatggggcagaatgtggcaacttacccctgatggctgaggaattaacaaaaatgtatgcaattggtcaccatcctctgcacccattcctgtcttcacttttctacctaccttgatcagtactgtatcatttggaagtacagttctgtctaaaacagagcacagcagccacttaagtcacccatagcatcctatgaggattgtacagtgagagcaaagacctgtgcctggcttagacccctaagagaagtagagacttgaggtaatttgagcagagtggaccacacctcctagagaagagatttggaccagccaatagctaatgagcaggcgcaagaatattttcctggagttcttggctcacgccaatgtctgaagagcgggactttctgagtggtgaagcgttcagtgactttgctagggtcagaggggttggaagtgctcagtagtgtgtgtcacattttgttcatgtttgcaataggccatgtaggaagtggaaagaattttggatttagattcaggaaatttgggtcttggggcaaagagtgctatttgcctacctaatatacattctcccatttatttaccattacagtactttcattgttggtgtggcaggttacccaagttaaccaaatatggatttcctagccttccttaagaagctagaggtgattgatgcgaatattcagagatcactggtaggcttctttaaagatggctgattcacctgggaggtgcacctcttttgtcctttcctcttgtttcttcttcctgcctgaaatgtggggctgatgactggagcttcagcagccattttatgaccatgaggtatgacccaagaatggaagccagtgctaaggatgggctgcccatctactcctggtcttcattttatgtgagagaaaagcaaacccctaatttgcttatgccacttactttggatctctgctacacccagttgaatgccaaactgatacacattgattgcccactctgtcattcactcctgagggactttgggcaagtcacttaatttttctgggcttcggtttccttacctctgcagtgggaataataattctggctttgtcttgcaagcgttacttctgacctgtagggctcactcttaggcttcctagaatgttctcaaccccagtctgaagatcacgtggtttttgtgcctgagcagtggctgcctccctcccattgtttggccagataattgttcccaaactaagaaatgtgcctgccttccgacttcaatggctgttataaagtccccttgtgggctcccattttctagagacacaatagcttttcctggcttgcccaggcctcacccctccttgctgggtgcagagacatctgctgtttcaagctgctaaaagagaagcttcaaagaaccccacattggcccctcttagggctctgactcatataaatgtttctagaaatcctcaaaagccttattaatctgttaagacatcccagaagcaggagtctgcacacccaatttccacggcttttcagctgcttccattgtctcagccgcattgtccctgctcggtgtcttggcccctaatggactctctctgaggcaggcacgctttcggctgcacctgctattccattgcctgactcttttcttcttcttctctgttctctttaactcttaaaatgaaaaggtgaccagctcttcctgggctgtttactcctctagctcccctgtgcgggtctctgcttcaccccctttctcttctggcatgtggctggatctgagtcagagacatagaggcccacatagaaagtaggggcccatttgtcttttccatcaaatggaagcctctaggggtctgtcattcctcatgcctagccaagataccgggtatccccacaagcctctgaaggggacttgcttacagctcttgcatatagaagctctaatcaggcttctccagaaactccctcatctctggtccatacagtaatgaccctctgatgtgtaaccttcactgtggttgaagggccctggagaaagagccagaagaccagggctctgttcctgacttgaccccagctggtttccattttcttagactagcatcaggggacttaacttgacagccaaggtcccatggtgggcagcttgccaattactcctgcctcctggttttcagacccctgtgtgctcccttcccttgagtatgggctagacctggtgacttgcttctaaccaatagaacacagcgagagtgatgggctatcacctctctagttaagttataaaagactagtttgcgtgttctgtcctgttggctctctctttttctctctgtctctccttctcagatgcttgctttgatgaagaaagctgctatattggagaggcccatgtggcaagaacttgagtgtagcctgtagccagtatccagtgggcaaatgaggctctcaatccaacagcctacaaggaattgaatccaactgacaagcatgtgagtgagcttggaagccaaccctgccccaggtaagccttgagatggtaaagccctgacttacatcttgattgcagccttgggagagaccttgaagcagagggcccatctaagctgtgcccagattcttgacccacatatatttagaggtaataaatgtctgttgtcttaaactgctaattttaatacagcaagaaataactaatctaggtccttattagctaagaagaaatgtgtttcttgccttgttcctctgtatttaaactctaggtccttaaacctttcatacccacgagctagccacttgggttgtgcatgtgcaccacccaactccaccaaccaccccactccaacactcaaatctatgggtggtgcaaatccctttactcttactccaaacatacatgatcagaaaaaatggaagaaagacatagctgaaatagagctccaatgagatgattcctggtttctactaggaatataagtaaaatttgaatttttgccagaatccaaagtattcaaggaagggctccttatacacctttgatcattcacttccatgtctcatctttcaaagcttggcttaaactttcctcctctgggaaaaaagaccctgacttcttcagttagggttactgttccctctcccagtcacccatcagttttgtccatatcagagcattctattttagttatttgcatattcccttctctctctcacccctccacggatctcctaccccaggaaggtcagcatccagtgaccttttcaggaaattacccaggatttcacaatcttagtcagaagcgaaatttaaaaccctttgtcccccgtcctcccagccccccgatgttccaggaagccaaagcacagagcaatctttccaatctaggaagcaataaagaaatgtatttatgaaccagcctctatctaagggagagaatttatgtctcttcatgctcttgttgacaataataactgattgctgcatcaatgtgatgcaatataattttaaaaccctccagaacaaggatcagaaaacaactggcagagagactgagcggcagccgtgggcatcttgggttttgcagctcagccctgggcctgctaatgccctgaggcgatgggaacacagctctgggagcacctgcaatctcatcttgtttctttccaagcaccagggaagaaaagcaatttgtttgctctcatactctaaagatgaacttcccgtgctcaatcaaacgttattatcccaatgtaagtcaatttacctttgaatttgaaggctattttcttcctaaatggctaattatgggagatagatggctgtaaacagaagtcttctacctcaacactccgccaggttttctccttatggcacctgagagaaccagagaaaggaggcctcacagtgtcctggccccctctgcccacttgccgcccctcctccattcttctcatgcatcctgcggtgccattcgcccaccccgcctacattcctggacgcctatttggagtttcatccccctgaattccatcccctgccgcgtccatttctaggagctccattccctcgtgccatctcccgtttttaaggactggactaaaggtggaggtcttggcctgagaaccgtgcatacgggacagcatgagttttaggagacaaggggtcctgtgtgtgtttgagatgaaacaaggtcacctgaggccgcctctttgatttgcctgacagagtcacagaagctgaccgctgcgaggcaggggctgcggccttttcccgtggcatgatcaacacctcgcaggaactaattgaatggccgagtttgtttactgagaggaggagtagccccctcctttctcgcaaaacaaagtctttccccaggagcggtggcaaagaggtcagccctggcagcgtttctgttttgccttttgatgaaagcctactctggctgctctgaagaagggagctcattgtgtgctcactgtcagaggtggctccagcagggaggccacagccctgggggctttttgggtcttggggttatggagcctgtggtgtgtggggttatctacagggactgagctttctagctcttctcccagaagtctggcctctggtcctctgccctttccacctgggccccagaagccatagtaatagcaacctgcctttgtccggtgcctcgtcgtcgtttatgcaagtctatatactttatctcacttgatcctcacaaccatcctgtgctgtcatcctcccctgacagatgagggagaggcccagagaggtcaagtgctctgcctgaggtcacacagctaggaagtgacataactgggacctgcctccctttggcttgaacgcctctgatctctcccgtctgtcacagtcccatcacagaaaggcaggcatgtggccccgtggttgaagccctgccccagctgtggatccgcatcacctgggccaggcttccaatttatgatacttactgagaccttggcaccacggccttgataaacccctctgccctgggcttgagcttgctgttctgtcgggggcagttcgcggggctgggaggacaggtaagaagggaggagcttttcatgagctgctctggaaaagtttaaggccatggtagggtcagctcaggaaagcacagcagggcaaggggcaggtaggcctgtccaactcagctaatagctacagaggtctcaagaagtaatgattggaggcctgactgaggcatagagaccaataggagacgctctctctcctagctcagaccaaggaaccctagaacatgctcctccaagttcacccaccgtcaccctgcaggggaggggtctgccacactccaaaaaagaatcaatccactgtgtgttctgtggactgttatttagagatgcccctacagattcctggagctgctgggccccatgccagggcaaggatcccaggactccctgtttagcatagtactttgattaaaacaataaattcccattgaataccgatgggcaggcaagtgggggctcatgccagcctcggtgccctcctggcatcatctcacagcaactcgtttggggagaaatacctccctccgctgtgatgagaaccctcattcccaatgaatgagggggcagaagctgcctgggagcctcaggaatgagggcatcatgggcaggacagggtaggactggggcagctgcagatggcaccaaggatatgggggccttgactaagcagggagggccacagaaggggagagggggcacacagaaacctcaatggctggcccctgtctggtcctcacctcctgaccctgtctctgcagacatgctgaactgggaggaacatgcttgggtcttggccccctgagcagctgtgctggagccacgcctcagtgcccagcgctgctgcatctgctctctggcagcacatggctgcatgtttctctgggccctgcctggtgcgcagcagccatatcctgggcaggtgtgctggggctgttgcctcacctggccctgggatgctggtagctccggattgaccagggtttctgatgggaagggatgtatgggagaagccagggagtggagagagaactcgtgttccccgatacaaggctttttacccatgtctccccaaatagccccccctcctcccactagccccgaggctggagatcaacatcatggtcccatctttaagaggaaccaggatctgttttgagatggccaatcagccaaagaatgccataattcacgttatccattcacttttcagttgacttccttccttccttcctgctttcctttcttccttttatccttcctccctcccttctatccattcagtaatatttactgataatccttcacatgaggcccgatgctaggctgtggaaatcaaagatgaataagcaatagcttctgtccttgtgctatctcctccgggtgtccagtattatgaccactgtatttctgaaccgaaaacgaggacgcagagctgacaggggtgagtgtacacgtgggaatgggcaggaagaccaccctgaaggtctgaggcattctgttcctaagctaggatgaaactgagtattccatacatactggctgcattgcatttttgtctagcattctttaataagaacagtaagagctgccatttgttgaacatgtaccatgtgccaggcttgtacaagataatgtgtataccatatctcatttagtcttcaccacagccctacagagaaattcactgtccagacagggaaactgaggaccaggccgttcgcagttagtgttagtacagtccttcttggccactctaaatcctctgctgcctctacagctggagggttctgatccgttggcttacaggtgtgtcctgtgggccacatgggggtgggtgggtgttcacagcacactgcctggagccatggtgcacacagcagggggtctgaggctgcgcagaatggcccacttctaaacaagcgtgtctgagctttgccaggtgtccatgtttggaacacaataaaagaggaggtcttcgaaaggaggtgactcagagaagcaacgctagactcaccccagagctgcaacctgctaacttcacagagcctcacagcagaattatttaaccccaagccccctctcctcatggggacaaaagagaaatcaggctgatgctatctccctcatagcacacttaggaggagcaaatgaaacggcatatgtaaaagtgcattgtaaattgcaaagtggcagatgagattattattactgcttccttcacctcaacaaagacccataatcacagacaatgcatcgagcctggtgagggtgtggcctttcttggccctgccctttctccttggctcctcccacgctcttggcttttctcctggattccctgctctcccatctgcagcaggttggggccccatggataactatatctagggaccgactcctgggatcttaccaagtcacatttgcagttggtgcctccttagtcactgccaggattccaggcaggtataatgtgctgcacttaatgtagaggatcagggtcccagtgagcagcttcatcttcaggcgtcgggagtgggagcaatggagcacccatggtctccaggtctcaggccacttgggtctgggatttgaggctcagggggaggagtcctgcggtgactgctgtgaagtggtgtgggggctcaggatgggacctacttcatgggacatgatggatgagactcaggatgccaggagggaggcacagcccacacttagcagcttggcgcacgcaaataggagctctgctcacagcctgtgctgggcacttcatttcccagagacaaccggcgcgttttaataatgtctacttgggttaatgaaagttgtcggtttcacttaataaatacattgccattcttggccacacatatccgtcatgctgggcctggagctgtgcgtcccgcctgagttgagtagggatgctgggagtgggaatggggtggggaaagcatggggcatatgggtagagagtgaggtctggagggcatgggacatggtccctcttgggagttaagcagagggagtcctctcattgcatctttcctctgggatcaaattagaggcacaaagggcagaagggaaccttggaggttcctcctgttcattctctgcctcagggaagtgacacacagaatggcccctttggcagggagcagtgagccatagtgtggtccagagggacgcaggccatcttgggaaggaatcccagttgaccactcattatctctgtaactaagtcaattattcaatctccctgagcctccatttcttcagtaaaatggagctaataatcatatttgcttcatagagcctgtttcgagcattccagcataagccatgggaagctcttagcaggcacccagcatctaaagcactcaaatcagagtcactagtattattaatgttaaaatattatttttatgaaggcacagtttagtatggtgtttatgagagtggatctggagtgtgggtttggatttcgggtgtatcacttactagctgtgtcactctggagaatttatgtagtctttctgtgtttcagtttccaagtctgtaaaatacggggaaataatacctaactcatggagctgtgaggagtgagcagattatgacatgtacatcctttggaacacagacccaataaatgttaagaattattaagttgtcgatttcacagggccatgggggagggaagtccgggctctctgggaactgccttccacatttccccaccttagggtggtctccagaccacatcccagatgaccttacacaccccaggggttgataccaggccgagaccctcgacattccagggagggaaccggaggactccagtcagtttccaagctgcataacttggttcaaggttggcagtgaggggagagacccaggggagggatcatgcttaacattcttgggacattctccttgaactctgcaggggccttaaaacatccctaagtgccatacctctacatgctggccttcttctgcactctttttttctttctttaaaagcttagactgattaaagatgggaagggatttggggggtcaagggaggactctggatgggaaaggggagaagctcagatgatgggaaggggcgggggtggccaggcagtgctttctagctgaagtaagcagctttggaacctgcctatcacatggccgggtattccagggtttttaaattgcatgccacatgtttatccttattaagcagttgttctcttccaaggggctctctctggcagccaagaaccaaccacagggcttgtcgtggggcttatgagtagctagggcctcccaggaggtcgtcagagtggatggaggggcaaagccaggaaaatacctgggggcttccactccctaaacccagggaaacgatggagtagctgagccgagattggctcacctccttgtacaggaagaaaaactgcggccagaggggcaaggcgaggaagtcgccataacacatttggtgtggttttgggcagacagaacgggtttcttatggctggggctgctttctaatgtgaatatgagtactcttggctgggagaggaagggctggaggagagatcaggaaggagagatccacatctggctccgagctgactctcggtgaccatgaccacctccttccactggagggagcagcctctccgcaggtggggctgtccctcaggagcaggaactgggctcccgctggagagaagcagcgctccacgttcaaagaccattattgccattattaattgatcgctgttattatcatgtaggcattaagtggcttcctctgccctttgagttgtaacacttagggcagctgctagcgaggacaaaacaaagcttccctactgcaagagctttatctgggtccctgctgctgtgtggccttctgcaattagccattttacagatggagaaacttagtcctaatgatttgctgaagggccgagttgcttagccctgcagggtacacagatgaatagggagcgttgctgagcacttgcaatcaagacagagttgccacccactgcaaggacgaacatcactactgggtcagctctgcagctgcaagtctggggaaaagggatccacccaggcactagggcaactgctcagccccatcgcagcaagggcccgaggaacgagcacgtcagctgtctccagggcctttctcatcatctcccgtgcctgccgtgctgtctcttaccaacccaggagggagggttggtggctgctgctccatcctcaccctttagaccaccccacaggtgggacagggtgggcccaggtggagtctgagctgggtgccaattccaggaatgcagctggaggtgggggcgggccatggtgggccaggacaggtgggagagaaaagcaggaggcagctgaagggggcggtctcagaagcccccgctgggagcctcctatccacctggcaggcgtttggaacaacgtgctgaataacagcagcatttgtgaaatctaattagtgcaggcccaacttctgacttcctgtgcgggggctcctcctctagccccaggctatcgagctgaattaagctgcctaagatcacctcattaaattcactaaccttgcttttccaccaggtttagcccctggtgcccttcctctgtctgtgggaggtgcgcgtctggcattcctccagtgcgttcccaggcaggtgttttgagaaactcccctcctcttccctcctctcccctccccaaatggctcccttaatcacgagctgctttcttctgagctcaataatcaccctggactaatccatacacaaaatcctgtggctgcagtaggagcccccttcccagccctccctggctaagggatggtggtcccagaggcactgaggactcctcctggaggcaggcagggggctgtccagaggcagagcattgggcctgctggcaaactgctaactggcacaggtgacttgcatttcctggggcctaactgctgggagtgcacttctggagtggagatgggcaatggggatgcctgatgagacctatgtccaggacaggaggggaggggatggagaagcagctctggagcccagcttgctgttagccctgagaaacaagtgacttcctgtgggtcagagtacagggtgggtagcagaaacaatcaggccagaggggtatttgttgcagaagagaaatgtgatgcaattagtatgctaggagaatggaaaactaacccggagacagggctaaagttactgcccactcaactctgcatggaattgtgctgaattgaggagcactgcagcgagacctgaccaccgcccagcccaggttgggtttgttttccccgctctgagaccggacctcaggaaaggggtgcggggaaggttgggttcagaaggagagactctccagccacacctgtgaagctccaggcagtttccctaatgtctctccttagcctcttgcagagagggctaatgtatgtcttccccccgggctggtggctgggttaattggaccttgtttatgtagcatctattatttatgatttcctttcgtctctcctgagtatgacaactgtggttaagcaaccagagttattcctgcctcgggacatgtatgaggacggtctcctttgcagcctacctgaagtgaatgtgaggccgagaggcttcgtgaaaggttaagtgggtgggggacctgctgggagagaggggcaggggaatgtgcctgagatcagacagccttgcactaagctcagctcctttctggggggacctccgatgcatgctcacttgtataaaatctaactggaactgggatcgtgttctgggggttccgaactttggctgcatattggaattatctgagatgtctgaaaaacctgacaaccagagattccagattaatcggtatgggggtgtggctacaaggtttcagagctccccagtattctaatatacagcaaaagttgagagccactcgcagctccagcacattcttactgtgtcagtttttttctgttgattatgaacaacagcagctaacattaatagaacctgatgatgcgataggcaccgagataagaattttatgtggatgacttcaacgaatcctcagaacaacccaatgttgttggaaggtgcaatgatcatcttccttttacagatgaagaaactgaggctcagggaggttaagtaaatgaggccgaagtcacacattgtttcagttaccaagttaggcctgacctgactccaaaatctgtgctgttaacttttttttttttgagacagaattttgccctttcacccagactggagtgcagcagcaagatctcggctcactgcaaccttcgcctcccaggttcaagcgattctcctgcctcagcctgccgagtggctgggattacaggcatgcaccaccacgcctggctaatttttgtatttttaatagagatgggggtttcggcatgttcgtcaggctggtcttgaactcctggtctcaaacaatctgtctgccttggcctcccaaattgctgggattacaggcatgagcctgcttgtctgaactgtaagaggattttaacagtttcccaagcaatgcttcatattcacaaatgaacacattaggctcaaggacagaagggacatacttaggatgatagactaacctggcccagcctgcaacctcatgggaatgtgggataatgagagagaatgtttgcattggaggtctgtgggcgtagagcactcaacaaatgccaggcactggggctataatcacatggggagaaggagccaaccgtgcatgtctgaagcaggtattctcttccctgcaggtgccaggactacagacagggcaacggagagcaggggcttgctggagaaatccatccttccctgggatctcttggagggctctccatctctcttagagcagtttctttcttagacagttgaagctgcctcagtggtctccccagatcatgcaggtcggggcagaagcttctcactcagagaactgagaatatcatttttcacagaagtctaaggtggaatttagaccaagatattcttggccttagcagtttgactcgggcgggggtttgaagctggaacttttcaacatacatctccaagcttcaggaggaagctagacacatctgaaagcctctgaacaacctgcgatgaagattcttgaaaaaagagaccatttgccttaggggctaagagtacaggtgcaagagacagaccgcccacattaaaatctgactccactcctgagctgtgtgactttggggaagttcctcaactgaagtcacaaagacctaatctgggaggtgggaatagtcatagaaaaaggatcgtggggaaatgaaacgagagaatacatgtaacgttcttggctcacagcgcccggtgaatgttagctgctattactgttgttcctaccaccgcaccctctcccattcctttccttctcaattctattgacatttttggtgtctaactccttttgagagatcatgacttttgtagaactaggctgctttcactctttgagggtggtctttctgattgatccatcagtctgcattctccttgccgtccttggtatgcacacacatgcatggaagctatattcctccttcatactggactttgaggacaacgttttcatgtttcacatttcccacttcatctcctttgttttccacttgcttagtttcctactcttccctttatcctgaggtgtcgtgagggcaatggcctgcagagtccaaaggtggctgtcatgtcatttgtccacgtttgcattcccgtgccctccccacagatggctgctctctgggctgcacgcacgttgggttcactgatcgcagagtctttttctggctgccaagaacatggtagcctcccagaggctgttggcatgtggatgctgcctctgtgatccacagccccgccaggctgatgcttcaggaatggatcacaccttggctggacccatcaggctggaacaccagattcttaatcaactgtaggtgctactgtcgctctaggacctgccgatgccctctgtccttctctggtgactttgtccacgtggatcttcagttccttcaacatgtgtgcttgttgccccttggagcccacctcctcaagcaagcctcccagcccagtcagcccctgtgcactctcatgttacctgtgcatctccttcacaactcacgtcactgatggacttacgcagttgggtgtgtatttggtaacctgtcttcctcctgctgaaatatcaactccaagagggcaaggagtgtgtctatttgttcactacagtattatatgaacacccctggcatataataagtgctccctcagaatttgagtattatatggacacccttggcatataataaatgctccctcagaatttgagtattatatggacacccttggcatataataaatgctccctcagaatttgagtattatatggacacccctggcatagaataaatgctccctcagtatttgaataaataaatgtggtgtcaatttggattaattttcttgatctcatacttgtgttctctatgcatcctatcacctggctctgctactaactgtctcatgaacttggaagctttaggggttagtcttttttaagtacattcgttaaaaaagagatgttgttcatataacataacattttcccctttaaaatagacagttcagtagttttaagtatatttacaacattttgcaaccatggccatgacctcattttggaacaatttcatcgcccccaaaataaaccccacacccatcactccccatttctgtccccgtcggtagccattaacccactttctgcctctgtggatttacctatactggacactcctacaacatgtggccttttgtgtccgtctcctttcacgtaacaaaatgctttcaaggttccatcccagttgccacatgcatcagtactttattcctttgtatgggtgagtaacattccatggcatagctataagcgcattttgtccattcatcatctgctagacatttgggctgtttccacttttcggctattgtgaatactgctgctatgaacatctgtgtaaagtttttgtgtgaacgtatgttttcagtactcttgggtatatacttagaagtgggatcactgggtcatatggtaactctatgtttaatttttgcagaaccgccaaactgctttctgaggagtttttatttgacttttttaaatgaaaggccaatttagtgtccacccccttacatttaaatttttatttgataaagaactcctttagaaacatattaaaaaccatggaatctccagataaatgcatatgtgtgaatatacatcatttcaggggtcccagaaccatcagaaactggctgtggatcccaaagttcgtgattacaggctcgcacgcagcagtgttttaaggttagatgattttctccaacacagaactccagctacagttttggctttttcacacggatattggagatggataatttggctaatgagttctaatccatgttctgatttgcatctgggatcagaacattcagcagccatttagttgccttaattttttccacccactctgcaatcatttgattgatgtgcaattacctccccctgcttggacacgtgctttcccctgctcatgtgtgtcatccaatgcctgataaccttcattttttcccatttattttgtgtgtgttggccactgtttgatataattatttttgtaatcatcttctattaggtgaaagaatattgcagtagagaaagaaggaaaaagaaaataaatgccttcctgacaagttctaatattttatgttcacaaatctcccaatatcagagcaataatattattttctcgatgtgcatttattaaaatgtaaagtagctccatcacattgggaacgaaaacccttgcattaccttggccagaaaatatcacttatttatttcagattgcatttctggaatgttaatactgttgcttttttttttttttttttttttatttttttccccatagcctttatctagcaggggagtgaacctgaaggtctgatttctaaacaggccttgctgaatgcacaggaccttaatttggttttaagaattgcttttggctcttgatttatgatgaggttcttttctgtgtaattcttttggctgaaaactgaatagagttctccctttgtgggtggcattttgacatcacattttaagacagggtacagatgtaagtggggagtagggaagatttataaaagagaagggggattaacatgtgcgctttaagggttggaaaagttcgatctattgtcgatttctctatggtatcaatggcataccccttagattccagttcctaagtcagaatgttaatttccaggtagcctagtaaaagagatactagattggaagtcagaagccaggagttctaatcctatttttccctctaagtaggtttgtgaccttggacaactcacttccattctttgcgctgttttctcaagtgcaaaaggaaaggttgaactaagatggatgggttttaatcttagctgcgtattagaatgccctggagagctttgaaaactacagtgatactcaggcccttagatcaattaaatcagactttctcatgagggtgcatggacctgggcattggtgtctctactaaacactgcccaggtggttctatcatcaagccagagatgaggacccctggtgcaggtgatctcagatgtccctccagatttctggttcctcagtgttatgagctgggcagtgatgtcagtccagccaaggctggtgagatgtatttgcagacaagtgggccgcaatcacaggattgtgattctgtgctggggttcgaggtgtctccgctgggagactctggggagatcctgaatggaattgaatttctcttagtatcaggtctgggttggggcaggtaaatcttcctttctttgtgggctcatggtgctgagaagatggatgagctggggccggtaaaatagctttgttccttggagaaagtcatgtagagagataaggtaggcttattatttttcgagtggaactgggactgtttagcctagaaaaggggggacttggggagaggcgtgatttgcggtcttcaagaggctgaaaggctgtcatgtggaagagggattggagtgatttgagatgctctggggggctgaactcaggtctgtgggtagagagtcagggaaagacattttggtgcattatgaggaagaattgtaatgtagagctgtgcttcatattccccgtgcatacctctgccttagcacctgcttttatgacagtcttctctacaatgagacgacatctttctcatctctgtattctcagcacctaatccagttcctggcacagtcctcaataaatgtttattgtcattcctgtgattattaattactgtcatgaatgcccactatgcagatcacttttcttgctttatcttgtttaactctcctaatgctttagaagtaagtatatttattaccccactctacagttaaggaaaccagagctttgggaggttaaggaatgggcaaaatcacagccagtaggtagcagaggctggatgtgaaattaggtctgtctgactcaaaaacctgtgttcctaaccatcctgcccaccaggatcctggaggtattcaagctgaagatagacaaccacttgggggacctagttgtgccatggcaataagtatggattgagttaggacagtcccagatgatgatggagccaggagctgagtagatttttagagtctgaggtcacccagttactgctctatcagccacctaccccacattcctccagtgaggtgttggcccggtccagaggcagagccttactacctttggctacataggctctgggatggcagtgctctctcagcagttatggtcttttccaggtaataagtattgcggcctcctctgccacttgcctgcattaagccttttggtcatatgtctggggagcagacttctttgtatgcccccggggacaggacaggatggagggaggagccctgggtgtgtgtgtgtggggtgcgtgggtggggagatgcatgactgctttggttatgaaacattgtgttagtgtgtccgttcacttcacatagacacagtgattgcattactacgcggccgagcatacgtggcagagggtggaagcagctgaggaaggagcaggtgctccaaggaaatctttcatcaaagtgatggcatagctaaaggcacagaaagaaatgcattactgagatggcgttgcccgttcatgggcggctgcaaggaaggctgaaatggtggcttgggagaatgaatgggagaggggctggaattggctggaaagacaggaaaaggaaagagggggagaaacaagttcgtgggaatggtgattcctttcaaatggggtgcacagcctgacaagctgtgcgttcttcttaaacacagcccaaatcaagtcttaacttgaaagaaaattaagtcagattcagtcatgaccctcctgttagcctggttgggcatagaggctttccagaaaactctctctggaggggttaggtggtggttgtagcagtggtaagcacaaaaaagggagccagcatttgagaatcaagtgcttaaaatacatcatcccatttgtttctgataatgaacacacagagtgggtgataggattttccttttacagatgagaagactgaggctcacagggcttttgttgttgttggtttagagataaagtcttgctctgtcacccaggttgaggtttcatggtatgatcatggctcactccagcattgaattcctgggctccagtgatcctcgagccttagcctcccaagtagctgagactacaggtgcacaccactgtgattggctatttttaattttttttgcagaggcagggtctcactattttgcccaggctggtcttgaactcctgggctcaagtgatcctcctgccttggcctcccaaagtgttgggattacaggtgtgagccacttggcctggcctcatagatgtttcaaagactaaattataagtgaaagccagagagtcttacttaaacatgacttaaaaattgtttattttaccacatcatgtgatcttccagttttccatcagagcaggcaggttggaggttgggggcttaggagtttgctttcacagcctcactaaataaattttggggaatggccacagattctagtgggcctgttagcctgacgaggctgaggttgcagacaggacccacagaatgggagaagctgagttacttgcaagttggaaaggtgatgtcatcatgaaacaaaatggatttggttggtgggcttgcccacgcagttagatggcaggtggtgaagaaacatggcctcttctctcttataactctgaggggcaggaggagagagctgggaatcactagattcactgcagagaagtttggggctgtatctaggtcatgggtaaactgataattggaaaagaaattcaaggttggacattcattttgatttttggttttcaaagtttatacttatctactttcaaaaataattttaagagacatactattttctcaggaaaagaaatatatgccctctaaatagttttcttccttgaatattgccagcaaatcagccatctcattgaatattgatggttgtagagcaaatcacgaatgctgacctagagctgccatttattgagttcctactagggatttgactctgttttaggtacattgcacatattagctttataaacattccccacaacccagcaagataggcatttttatccccatttttcagatgaggaaactgaggttcacagaggttaactgacttgctcaaagtcccactgtatataagtagcaaaactaagatttgaactcagatctgtctgacttcaaaatcaggtgctctttctactctgtgacatgaggctatgaacatgtgaatctcagaggtaaaaagcagagttggatatggtttggatctgtgtccccacccaagtcttatgttcagttgtgatcctcaatgttggaggtggggcctggtgggaggtgattggataatgtggttggtgttctcatgaatggcttagcaccatcccttcagtgttgttctcatgatagtgagtatgtgagatatcacgagatctggttgtttaaaattgtgtagcacctccccactcccctctcctcctgctctggccatgtgagacatctcgcttctcctacaacttctgccatgattgtaagtttcctgaggcctcagctaggctgaggcagatttatagttacgcattggccagggtggtgctaactcactcatgagaactcacccacatgatccaaaccatattagtgagccaaactctaccttttagctctgagattcatgtgcgcagaaaccgccatgtttcttgtacggcctatggaaccaggagccaattaaacttcttttctttataaattacccagtctcttttgtctttctttttttttgtttttagacagagtctcattctgtcatctgtcacccaggttggagtgcagtggcacaatcttggctcactgcaaactccgcctcctgggttcaagcgattctcctgcgtcagcctcctgagtagctggtattacaggcatgcaccaccatacctggctaatttttatgtctttagtagagacaaggttgcgccatgttggccaggctggtctcaaactcctgacctcaggtgatccacctgccttggcctcccaaagcgctgggattacaagcatgagccacctagtttcagatatttcattatagcaatgcgagaacaacctaatacactcacccttacctcttcaacacaaagagtcttcccagagcatccctgctaagggctgtgacttgaatcaccctcctctactaatgaaagactcgttaatgactccacgaggtgtcaggtccactgtttgatcctgcattggttcacccaaggaatatttaatacgtgtccactgtgtgtcaggtactattctagaacctggcaggccagacaagggcctggttctcatggatcttgacttctagttggagaagcaagcccttgaaaacaaagtaaataacaaagagtttcaggtgctgataaatgcattggagataatgagacagcggtctagagggtgtctggccatagggatccctttagatggaataatcagggaagattttgctaaagagatagcaactgagttgagatctgaatgacaaggatatgccttccaaagatctgggagaaaggggatttaaggcagaggaaacaggagatgccaaagctttgaggccagactgagtttggcacattaagtaagcccaatagcctggagagaacaatcaactagggggagaatgggaggagatgagcccagagaggaaggcggaagccagatggtgtagggcccacctgccatagcgagggctttggattttatcctaagtgtggtgggatgccatcggatgggtttgaatgggaaaatgacataatctgattcacattttaaaaaaagatcctatgtggagactggattgcaggaggcacttctaattgttggaaggactgttctctcttctactgatcaaagttggttcttcaagtaatgacccttatgaaactgtcctcacaacattaatgagaattacaaaccagactttaggcggatttgtagttaggcattggccagggtgcactggtgcactttgacccacttcctagcagctgctgactgaccaagagtcacacagcatgctgaccacctgctttcccattgttcctaaagatagaatctctgacactggacctttttactcaagaattacttaagttatttttcggatcctgaaatccagtggaatggctcatacccaccagtcttaagacccccaatcaaggaactgacccagcacaggcatgcggtttcttcatctccctgtcccatgacttcattcctcacttcttgaccaattagtgatcccctattcccttacaaaatcaaactccttaaaaatcccatcctaagtttctcggggaggcagatttaaggtttcctctcatttggctgccgtgtgattattaaactctctctctgctgcaacttccactgttttgctgtttgcccacacagtgggcaatcgaatctggtggtcttataacacttgaccaaaaaccaaacaacaaaaacaaggctactttcttccttcttaaaatttttccaatcagctattatagttccctttagttctttctaaacttcccttgttctttgaattgatccttggattctagacccaaggtggattctagacccattatcttgatcattctttatcagcaaatctcttgcttgtccatgtccttattaacatgtggcatccagtaccaaacactctttcaccagcccaggattctgaggggctgtgaattccaaggacatccattaatgaaaagtattagactaagtctttgttgagtagtaattcttaatgtgaggctctaggtccatgaaagggcccacatacaccacacaccattgtctatggggtgcctgtgcatgtgtgttgtgtatgcatttctaggaggagagtccatagctctcattaaagtctcaagcagagcctcctccttgagaaccactgccctaggaagttaaatcaaaggatttctctactaagcagatgttacaattagttccttcctggtcccacattcattcccttgctgccttcttcaatgcttttataggtctcttgatctcttcttcctgcctcataccccactttaaattccttctttagcttctaataaatcatccaaacccagagaagataacttctgctttcttcttggagcagcaactagtgaggaaggccgtaccccacttgctggatgagaacatactgacaaataggcctaagaccagaggctttttgttttttcttctcttctctggactcataggtctttggaactgacctgtgtgcctgacttgcagacttcttaagagcagggcacagagagactggaaagggcttgagtgtaagcgaatgcaaagggcaaagtcatcttaaaagaattattattcatttcccattgcagttaattttggcaccttcatcagggtttaaattctagtaccatatcatatcaaaggaaaaaagtatttgatgtacgtgttaattactgctaagatgtagctacttaaatcaagagtttaatcttcatttgactattcagaacagctctgagtgggggatggggagaaccccttttgatttgggttactttaataggtgatgagaacttcaagcaaaatggctttctaatttcagtatttggatgtcttgcaattagtacccagctaaaggaaaaataggaaaatcaggttcctccaggaattcccaagtttttgcttgttctgtgaagtggaagaatgttctgaataatttaatttcatgtgctcaaaggcttgagaatctgcagagtgatagcctaatggtaagtgatatcttaaaagcgtgtgagaggcttaaaaagtagatccatgtataaaataataaactattatttaaaagcacaaattgtcaaaatgatactactcttagatacactctttataagaaccatcttggttgaatcctaatgtgcattttttttaataccacgaaactataaaacccattgaaacaccacattatttaccaagtgattaaatcatagtcatctattatagttttactagaacattgttttcttggaattccaaggctttattgcctcagatataacactttactcctaataatccctattgattttattatattaccttatatttttagatttgttttaatgccttgcattacattttagccttaatgtgctatataaaatgagatacatcatcatgtttctcaaaccttctgaaggtaattatcttaactaacatggataaaaaaatgctcattgttggctgctgacagtggtgggagtctgggggtggggaaggtacattgtagtctctgggactgttggttgtatttctggacagttgaggtgctgcccatgggctgggtgaatggtggtgggtgtggtaatggggcattgccacagattaggtatctcatttgtgtcattattttgctatccttgcctctcttgggatttgtggctcacactgcatttacaaggtgttttacatacagtaattgttcacttgctaaatcagccagtagagaacttggtattcttagagaaagttgttgcacctttgggtgctgttttaattactttttcaaggtgccttctaaatgttaaaaatggtgacacattttatctcaagttgaactttgcatccccattctctggatttggggtcattctcttgccttggagtctggagggaggagaggagtcggttctggcttgtgagccatggtgctactggtccctctggaggaagggtagctactgatgagccttccctgcagcaattgtgtcccaagatctgacacactcttatcagggccccagcaaataactcagcaccttcattacaaaagttagccaggtatggtggcatgtgcctgtaatcccagctactcaggaggctgaggcagaagaatcacttgaaccctggaggcggaggttgcagtgagctgagatcacgccagtgcactccagcctgggcgacaagagcgaaactctgtctcaaaaaacaaaaaaacaaataaaaactccacaaaacttcagtggagactagattcttgactactaggaactcaaactctaaaaggagaaaataatcacaccagctacactttttacagtgctaactatactttttgtagagttaactacatgcacaattttatttgctttatctatattaattcttttcatccttatgaaaagcagatactatcattagctacatttcataatgaggaaatggaagtacctagaggttaagtattttgcccaaggtcacacagctagagagtggtagaccgagaattcaaacccaggcaatctgatgctcagaacctagactcttaattacactaatatgatatttacaatttacaaagcgttatccactagttatctcactgattttcccaagagactttggctccactttagacataagaaaacagaaataggtcatcatttgtctaaggtgacagagcccaaacccactaacaggacagttttcttcaccttcaactcatctcaatgggtggaaaaacctacccacatgctatgaggatgggaaaccaaagtgtctttgcacataaacagactgcctccctggaaaccaggcctgtccttggtggtgtatgagcaggcccctgggatcgacacatggatgaagggagccctctgaattctcccacatctctgggcacccctctaatgtgctcttctcagcttgttgctccttcactgtaagtccaagttctttgaaggaaggaactatgttggtattctgtgatgtacgcggctctgtgtgctggtgagattttgtagccactggaatgatcagaaaaacgtctgtgtgaatcttgcatgatggaagaggaaaccaggtaagagtgagcaagcaggatggtaaaagggataacagctgatgggccagcaaggatgcggggaggatacctgtggtcaggaccaggttgtgtgcagggcagctctgattgctttcttagcagaaagcacaagaccaggcaaagcaggcgaggagaaagccattgaataaatactaagctagaaaacaaagatatacatagaaattctaggttctcaagaaaataaacaaaccaacttacagaaaacccctttccctgtgttgaggccctctgttgaacctggcaataaacgttatgcctctccccaaccccagtccagaaggggctggcaggtacctctttttattcattgagaaagtaacggtgagcagttttgtgaattctgtgaattacccttgaactggtcagaaagatccaacagctcagacaaggagaagggaagagctaatctcctcttcacctgtgatgactgtttttccacctgtggcttgggaaggaccatccttgctggtgatggatgttgatttagtgctttgagatccctggaagacaggtcaggcaactaacaaggaaaatggcattttgggtcaagtcactaggaatgaagaactagaatacagggagccagggggtggcggtgtggcggggaggaggccagaatgaaagataggaggatcagagaatggtgataagtttgtacaggtgggatcatcagttattctccccaaacagatcattcttgtcttctcctctgatttccactaggaaaaaacaaaacaaaacaaaacaaaacctgaggtatttcttagaacacgaagcatgaatcacttacaccagagatgagaaaagcaccatcaggtgcttaaaacacaattataattggaaagaccaagaatttgtggttcatttctagcaggtgaacaaatgtatgtttataatggtgtaaaaaccctggtttccccttcccattcccggtgccttcccagtgtgcttggaacactctactgtgttattcacctgacggattaagctcagcagaggcaagctgcctaggcatgtcgtgtaattcagcattaagtatcctattgattcactgaagtgctgccatggatgttaatggagacaaatattgtggctgtgatttttcaaagggctgagtaattcccgagcatcaataacgtgtgtcatgatgtaatgcagggagacctccagatgcttgacttgaggccaactacggagggcagagctgatggaagggcccgttggatactgacccagggcttggggagatagcctgcactttctccagacctaccatcagtaaggatggtggaaattggggtggggcagggactgctgatggcgtttcctagtcactcatcacaaggtcactgattgttggatggcatgggcacgcttcccattatggaagcttgctgggccttaggagcttataccataccctgtttcagggaacagggtgggttttctcccctctccagttggaaacactacatatccctgatgataatgcagcaaaactactatctaatcttaacagcgtctaccctgtgccctacttgatctgagcatgtgaccacttcagtgcacgattccagtgactgctttcagagaggttacatgccttcctcaaggtcactcagcttcctcaaggtcatggactaggctacaatccaggtctcaggactgcttcccctggtctattctcagttacctttaggtagggtctctggaaatcatttgagtatatggcctgaaacaagcgacattttcttccaaaaaggctctgtaaaaatctcagggttggtcgttgtaaggaataaattattcccaaacaaatctcatttcagtcaaattctgcagactgcccaatctttcctacactccaattcattctccatactgctgcttacattatcttgaaacaagacaaatccaatcttgtcactccctagcatgaagacttccatcagcccctctctgctgacaggataaactccttgcatgatattcacaatctctcccccaagcctgcagtgtgatgtcctgcccctcctgtccccagcacttggaacatagcagaccactttatgctctttgccccctgaatattttatacaagtgattcctggtgtctagaacatctttcccccacctgctgcccagaaaacctcagcccattcttcaagagccagttctactatcccatcccaggaaaccatccccacgtctccagggtagagttatgagtggtcctttctctgagaccccacagaacactgcttatccctttattacccctgtataatgacagccttcctattgaacttactgatttattttcttgtgtatcttcctgcattggaatttggatttctgcggttgggggctgtgtctttgtcatttttgtcctcttgttggcatgcagtaagtgtactacataagtttattcactgaatggatgaatggattctggaatcagaaccctgctggggtagggactatcagtagggtatagggcaaataaattggccctgtgagatacatgtttctatagtcctgggtctaggagggacccttgggggcttgagaactggaggcagaaaaactgtccttcaactcagcagcatgctggggtcttggagagagtctctggggctgggtgtgccctttaactaccatgtcccttgaaaatggtagccctgagaacatatgcaaacatgtattcccttgggaaacagagtctgacattctaatgaagaaccagcacacttgactttgatcaacaccagccttataagcagcatggatattgaaacattcagtaaccagcatggcatgtgcatgggtcagtcagaatgcacacaggccacagggctgaagcagaggtctggagggctccattgtgccaaccattaactctttagtagctggacagtagggggtatcttggaggagggtctgagaatagcaggagaaacatgagtaagggggcttgcagcggtgactactgaccagccagtataaaaatatttcattattttaacaaccggccctggtactgctccaccggtgcctatcagcccgttgataagtcttgttaaagaataaccacagttttggctgggcgcggtggctcacgcctgtaatcccagcactttggaaggccgaggcgggcagatcgcctgaggtcaggaatttgagaccagccttggccaacatggcgaaaccccatgtttcaccccatgtttctactaaaaattcaaaaattagccaggcgtggtggcgcatgcctgtaatcccagctactcaggaggctgaggcaggagaatcgcttgaacccagtggggcggaggttgcagtttgcaccattgcactccagcctgggccacaagagtgaaacactgtctcaagaaaaaaaaaaaacaaaaaaaaaagaataaccacagttttgaagcctcaaaggaaggtgtgtgtgcatgcatgtgtgtgtatgtgtgtgtgaaggaatgaggcagagctctataaaggcagtactagagtggaatctttcatttttagttgtatttcaatataagcataaggaggtggaggtgagagaatttcagactgaggaactgaaagagccagggcacagagtgtgaaagggacctatttgggagaggtggctgtaggatgctgaggattcctgggggagatgaggaaggagacagaggctggagcaggtggccaagggccttgaaaaccatgttgaagcatggtgacctggtctgtgttcctataggccgccctttaggcaaaccttattgcttaggctggcttttgggtggtccttgctgggacaaccagtggcgtcatcttcaccaagtctagggtggtcacctggtgatgggaacaagcttctccttaattaagaatgtcatagcagcctccctggctccatggtgactgacgctgccagtccagctgccatgtggccgatgtgtcctaccgtggtacatcatctcctaattaacatgtcttgtcaggtccagcggttggctttagtaaatatgcctcaagcagctgtcactgggaccctgcgtggggcctgctgcctcattagctccagagaagggagatggcattggcggcaggagggagggagaagaatgttctttatggggggtgttggcaggattagagggatgtcagatgctcagagagaactcacaggccccagtggagggcttggatctgagcaccatgagcctctctctctcccatgtgtagtgagaggataggtgggtagcagtgtgggcaggaaaacagcccaggagttgggagacccacatcttcattctgtctctcccaccaccgagcaaggctcggtctcctggtttgagaaacaggaatgatcccagctctacctatcctgaagtttgttgagtggttctaatgagcaaatgacctatactattctgaaggacaagaaatgctaaattttacagaaatcaagccagggcatggttgtaatttggggctatcagagagaagtctttgctcagacaagactggtccctctgaacacacttcgcccacccctccaaggcttctggcctgcatcccactgcactgtctgagcactcatcaagacctgctcaccacccaccaatcctgtcagactctttctctccagcctggcctcgccttctctgtgagaaggaaaatgagaacattccggaaggaagcactcttctttctctggctgctggagtaccttccaggctgtggaggcagggagctgacttcacagtgactgaggagacataccttagcccacccccactggattttgagcacatgcctaaactttgtacccatgagagcacatagtaggtggttaatgaatgtttgctgagcaggaagaacagtatatcccgttctcctagctctcaaaacaatggtgggtgatttcatagtttctttcagcaacttgttctattgccaacctttctataagccttcttctgagatccagcccagtctccttgggcagtgtgtatctgtttcctctttgtccccagcagagaatagaaactgactgtcattctctctgcctctcctgaaagactaatactaagcactcttatctcaccccttcccatctttcctattcatcagatttcctggagcccagcctgctacctggagccagggcctcgcctctactgccccctccgctcgctctgcctgtgcagggtccatcctgaggagagtctgagcaactgaggatgttgtgaaagcatctgacagcacagggaggcagggcttccccagcccagcagaggcaccaaacccacgcaatttgtaaatctttgataatgagcatttaaagggcacgtcctaatgaagggagccaggaatgactggccatggaatgcaggcagaagattttaattaaaatgcttgtctttttagttttcctcttcccttgtctcttccaaacaccacctccccccaacccctgccaatgatgcacatgtcttgcttctggaccaggcctgtgcaaaaaatgtgcgtctcatatttcccttgatttagttgctctctgggggactgggtgctcttcttcagctgggcgcgctgtgtgggtttgacagggactgtgcacatgtgggtagaggcggaccaggactgtgctgcctgcagccaagcagatgtcctcaccccaggaagcacagtggggctctaagagagctcatgaatgagtggcagctgccagccttgtgagcttcctgtagtgaagctctggggggagctctggggggccagctgggagacttctgggccaaaggggtgttttatggggcctctcacgatacttttctctccaaatggctaaatggagtgtggcggcagagcagctgtgagggactttgcactgctctctctaggggtggagggaccgttggctggatgccttccacgtgctcctccagatccatgtccaccctgccctgtgccctgggaatctgagctgtgtggattccagcagcagacttccttgctataggcttcagattgggtctgcccaatgaggaggccttggcaggacatgggcggaaataggaaaatgaggttggactatattttctggcgctttctttgtgagatcatctcagggctggttgtgtcttttgattgaagtccacagtgcctggtaaaggtggcttctctaaaagatgctctccttcctggttctatgagccactctgtcccttcactgctgccactctttctaaccccaagatactatactcttccttgtattactcctggagcaaaaccttgtaaacagtccctttattaaactctccagattccccaatttctgtgtattgtctgttttctgccaggatcctgatagattcacctgttcttttccagactggttccttcgcaccagacacatggtcagaggggattattcatgttattcctgggatcctagctctgatgtggaatgcaatgtagtctggtgggtgataaacgtccctacttccacatagacggactgggtttggaaaagtgcttgtgaatttgtttcccaggaactgatgatagtctttggacttctccaaaggtctgtgtcgaatggaatataagccccctctctgtgtgggatgaggtgggagtggggatttattcctccccaacatgttttcatctgggctatgatgccattctcattttatagacaaggccactgtggttgagtgacttacccagaatctaagaggcacgttctcttcaactaatatttagcaaagaattaaagcaggttttctaccaattgatggaaatctttcctccttttgttccttgccccttttgctatttgttcactatgaagacctggcttcaaggatcttgtggggaagtgagtagggctttggtcttggactgggaaaaactccactcagatacactctctgtcagtcaagctctcaggcttttccttatccagcaatgacttacctcttacctctgcctggagctggcctctgagtagggtttctgatcttggcttagcagactgattgcctcctgcttgtgcctcagggccctaagcttttagaagcatgcctcactcccagcctaagagcttgtctttgactcctgattggccctttttcctgatgtgtgggttggtgttctcgaccccacagggcgctgaactccagttagaactgccacccatggcaactccacagggtgagcccgccctttggacctgacactatgtgcctgatcactctttcacagacgtctcccttccttcccactccacccgagtcaaggctcctgaccaactaggagacagaggccctttctccttgacacgtcctgcctaaagtgtcagcttccatccctgcctggtgttccccacaccaaaatatgaaaccaatctttcttctcatacacagtgacacagtagctacttcgtgttccctcttcattcagttgtctgtgcaatcagtctgtatgtatgtattcattcattcattcattcattcattcattcattcattctgctatgtattcagcaacctctaggtgccacagcttgcaaatatcatctgaattcattctcacagatctctagcagatctctagtgttcactgttactgccattttacacatgaggaaaccgggtcaaagagtaactaagcggcttgatgagggccacacagctggcaaatgtcggagccagagtttgaagcagaacgtatggcattcgcactggaattctcaaaccccagcacaaggcacctattcacagacagtttgaagttgttcatatgcagaatcggaagattctgagcagattccatccctcctccccataagccacacttccattagctctgctcaggacaggtgggcccctgtgtgttggaaattgagatggagagaggtgaggagagaacaccctgagggagaagtgtgtgggggtggtgcaggcaagaccaattcaccctgaggtgatttgcatctttagcaggagtacatgtcatgctgtcacagccttttcctgtattgacataataacaatcctttacttttgttagcactttgtagctttcaaagcagtttcaaatccattagctcattttattcctacaacaatctcacaaaaggcagaaattattatccttattttgcagatgaacaagctctgtgaggctatataacttctccagagtcaggaagcctggatgcaggcctagatacctgactcctggtcttatggattatgtaccttgcctcacttttctcattgttactttctgattttgagccatttagggggaaaggatggcttcctagactctcagaaacccctcactcttgggttccaggccacctagactacataaagcagtggttctcaaattttatttgacaccgggatcacttggaaggccatcacatagattactgggccccactaccagagctactgattcaggaggtctgggaggggcccaagaatctgaatttccaataagttcccaggtcaggttgatgctgctggtgtggtctcacactttgaggaccacagatataaggcaatgcctatgagtctttagctgaatttctctaatcagggctcttcttctgggctgcagaaacctcagatacagaaagaattgcccttgtgggtctctccctggggtgagaaatttgtgtatgtcttgcttcactgactgtggtgtgacccagagaatgggaagaaaacctcaggctttttggtttatacacacacacgaaaggaaaatgtccacacatgagattattaattcattgttcaattaagttatgatctctaaaattatcacaatatttggctcggaggaaggcagcactgaatagcttgttacacgtaatgtgtgaataatgtaactttattacttttcccactcgtaagtaattgtgactgacacattggcaataacacagattgccttcttaccttcccctctctctactctcagcacggagcgtttactttcttgtctctattattttcttgctcatcctccttccctgccacaagcctcctccactgcatattagccactgctgtaacaagtatactaatgtctcctcatcaatttttatctcccaatgcccaggcacttggagtctaaacttaaaaaaaaaaaaaaaaaagaccaggcgcggtagctcatgcctgtaatcccagcactttggcaggccgaggtgggcagatcacttgaggtcaggattttgagaccagcctggccaatatggtgaaaccccttctttactaaaaatacaaaaattagcctggtgtggtggtgcacgcctgtagtcccagctattcgggaggctgaggcaggagaatcacttgaacctgggaggcagaggttgctctatcaccactgcacttcagcctgggcaatagagtgagaccctgtctaaaaaaaataaataaacttaaaaaatcattctctattaaaatccagtctaagcactgccatgatttgggtatggtatgtttggccatgccgagtcccaagtctcgtgttaaaatctgatttcccaacacacaccggggcctgttgtggggtgggggtgaggggagggaatgtagaggatgggtcaataagtgcagcaaaccaccatggcacacgtatccctatggaacaaacctgcaagtctgcacacctatctcatttttagaagaaataaagagaaacaaacaaacaaaaaaattgattcctagtgttagaggtgggggctggtgggaggtgtttgggttgtgggggtggatctgtcatgaatggcttggtgtcattctcatgctcctgggagtgagtgagttctcattcttcgttcccacaagaattggttgttgaaaagagcctggcacctccccctcgccttgcttcctctcttgctctgtgatctgcacatcccagctccatttccccttctgccatgagcggaagattcctgaagccctcaccaaaagaaaatgctggcacaatgcttcttgcacaccctacataaccatgagccaattagatctcttttctttacaaattacccagcctccagtattcctttacagcaatgaaaagggtctaagaaaaacactgtcttgtcttccttttccatcatccatcagtgtatgtttttgtaccagcaagtatgtttatttaggcagaaccacaggtactggcaacgtatctacagtgtagacatgaaaagaacaggaagagcataagtaacagagattttgttcacatggtttagtcatgttcccactgcaatgtccctcttcatacagtatttcttacctccttccacctcttcagaaagtacagcgtagtccacatgaatgagacctgagtgcactggggcatccttccctcctgctctgggggtcaggtgtggtaatctggcttagcttcctccaaagctccagttggaagggaacacgttctctttttctggggtgatccagtgtcgaaggccaatttacatgcagactgggtgtgttgtctgtattgctctgttcaccggtaccgaaggctctgagtaaggtggaatcagaccctactctactttccctgaacagtgagagcagcaagagctaacagctgagcatctactttgtgccggaccctatgacatgcactttccatgcattcatgcagtcttcacaataattgaatgtggaaggtgccattgttccctgtattgtaccgctggccagtgagagccaggagcctgtgctcatcacaataccatagttttcagccccccaggctaacatctaccctctctcgtggtgcctgggacccttctggacctgatcaaggtgtagcagctaatggactcggaacaagtctctgtagatttgagtggaggcgccacttgggctggagaggcttgcggggagctttgcaggggaaatgaagcttgactcttgggtcctcagggtttaaggtttgccttttttctcaaaaaagacttaaagggaaccaggtcccttgtacctgctgtgtgcacctggcaaagagtgcatcgggtggaatgcagtcctctctcaccaagctcttgcactccattgccccctagcctagaatacttgctccctgctcagtaaagaatcaaattcctgcaaatatccatcctcggtcctaggctacaggtctgcgccctctcggaggcccttgctggtgctctttccactaagcctcactgcctctcctgtcttcaaggggactgattgcactagggaagtgtggagggagggtatatgcacccagggaagaaagcagcacagcacttctcacagctctggtctacagttgctccactcagcaagtggggacagttccagcttctgggctcttcttgcccctaaacttctcctcgatcaggagtaatatagtctgagaatgagcacaaagaacactttttcttttaaggattgaccttttgctcaatgagcaggattgaaccttgaacccaacaaaagggtctgcagtgaggcagggctggacagctccacctctaggcaggcacagcaagtgtgggcattgcttactgcagagaggcttcccttctaaatccactcatggggggtgccaggtgcttccctccaaggcagaaggtaacccctcccagtccagagcaaatcacggtctccatgtttttcctccctggtcccacataggtgagtgatatatacagaggttagacctcagggttatgttatggattggagggagcagagaagcttcctcattaaaagggctgggctggttggctggctccaaggccctcagcacctctgggcttctgagccatgggagagttggacagaaggctgaacagtggctgatggcctggaggaggagatagggagggaggagaaggctggatgctgggttcccattgtacacccccagcaacgagcccccctgccagcccagagtaaccagagatcttgggccacaagtcagacacacctagactaagatgtggctttgaccccagctggatatctgctcacgtcatcaaagctcttgaggcctcagcttccttatctgtaaaatgtggctgggaatacctgttctactgatctgaagaattgttgtggtaatctgaagaggcgattggtataaaaataccaggtaaaaggcagagtgtgtcccatgaatgagacaccctgtccttctccctcaagacatcctctttgtttctcattcccaatatgaaaataacaaaccattctagggaacaacttggttatttttgggtcatgggcagggccagcaggcctacaggtagcgggagggatcagtggaggaagcgacgtgattcctgtaagacttgaatgcccctgagtcaaagtctgctctgaagaccagcccccttagagtgacagagatggggctacctcacaactctgccacttactatttttaggaccttggggaagtcatatagaattttgaattttagttccttcatttgtaaaaatgggaagggtaatagcactatccttagcattataaaataatggatacttatggcatacccagggcatggcatgtgctaagcattcaataaatgtggactattattgttatttcctttttgagctagttgtgtttgcttgctacggaggaaatacccatttcaaagaattgggaggataaaattaagagactggtaacccagcatctgccgtttaacagatgccctgtaagtgagtgccttcctctttctcccttctggcacttgttctgttgagagtctgtgatgcccaaaccttggaattaaccctgatagaaaaaaggcataaagccactggatatgtggcagctctgccttcgtgttgggctcacattacagacatttgagtgtctgcccctcatcctgccccccagatctcactgctctctgagtcttaccttagtctcctgtcttttcttctgccctcctggacccagcttactgcctgctctgctgccagcaccctttcttgtgtcttggtatctgcctgagacctttgttttgctggttacggttgtggcctgatgggctaagctaggccctttgtaccacctcagaacagcaggggatgcagcaataatgccaactaggagtccggatgatctggacttgaatttgtatcccggtttaaccacttactctatagccttaggcaaggcacttaatgccattgcatgccattgtcacatcaatacaatgaaagtaacacctatatcatggcattactggaagataaaaagagatgactgagggataaaaaggcgatgtgaaagtccctaggagggtaggcacttagtaatactaggctacctcccttcctcctcacttctctagtctcaatgcctgcttaggggaggggtagagatcagggtggtgagttgtctcctctgcaggatgactcagcccctccctactcccctactctgttactgcctttgcctcatcatactctggaaaacctagactaaagtaagttttttagctggacctatttttggaggtggagaatggaacttcctcactggtatgctgagttttgatttccatatgggctgatttcagagtaactgggaaaattcagtaattagcagtagcagcattagtgaatcatgttgtaatcatcctcttctcgcttcttccctcttctgcatgttccaaatgctattaccgacactatctttccctccactggcccttggcctcatgttcccactgcagacgttgtgcttcctgcttagcactatgggtcagcctctgggtactttcctccctcccagcctccagcctcctgctcaagcctctgcctatttgtccagaaccctggtgggcacatttagctagtttctcctcttgcaaattcaacctacaggtttatttcaattcaaagaaaaaaatgactcatctaaatcctgataaaaacatggctagtgctgtctgggctgatgaaatctacttggagaatggagaacctaagagaaccttctctgtctaagtctggatatctctgcggatggtcacttaaaaaaagataaaaatgcagaggagggttttccttagcaaaaactaataatcagtggctccatccatttatccatctatccatctaggaaacatttacacaatgtctacaatgtgccaagcctagcactgggctttaaggacatacacatgatagctgagaagactagcaagtaaaccgatgaccattgtacagtggaaaacatgccaagagcacagtgggagcatgagtcagtgagcagcaggggcagctcctctgagagggaaatgcttaaatattgaggaatggagagaatttagctttgcagagtttgctttcattggtatgcgtgtggaactaaggctcaacaaatggaaacctgtaaaatctatacttactcaaatttttgtagagcattgtaatgtgctgggaatgggaagctcagaagaggaataataatgggctttgctttggggtttagcactgacttctcagaatttgagaatttggaacatttaagtaatcccatttcctcttgacagaattttcctaaaacatgccagagagataggaatagaaacaccttgcttgttcttaaagaatctaaatctccacaatgttccctgttcattccatcatctcctgttgttggaaaaacgtacttgtctgtcctctggctgcaactaaagtcagtcctctccttagggcacccaggaactcttgatgtttcaccagtcctcttgctgagctaaacccaagagttgttctgtgttctatactgagtctggcctagtgtcacagaatctgcattagacatagaaatcattactgcataaatgtggagcaatattaacaaaaagctgaagcattcagatgaagaggcagctgttttgccttaggcgggctggggtgggtagccccatagtccgtggataattctccctccgtatctttccctcacttatcctatatgttcacgtcactgcagttatttggtgggcagttgtagtcttagatgagctttagtgaatgggagcccagcttgagggcttgaaattcatttagtgtaggaaccttggtgagaaggttgctgctgtggaggaatcgctatgtgaaaggactttagtcttcaaaagccggctaatgacccaggcatcaccccgtctccccatggccccagtgacagcaggcacaatgtctggatattgagtaattacctatttccttttctagatgatgtaagctctgttttgcttaccactgcatccccgggggctggacagtacactttaatgatttttttttaattgaatgaattaagattcacaagtaatttgaaaggcatctctatttatctcgctggtgtttctcagtcctgggctgcattgccaaagtttccagtttcttcatgacttggccagccccccaatcatcccaaagcccagttaagagaaacacttcggtgctaatagatctggaaacttaagctctggagggccacctgtcagatgagatttgccttcaaaggccactggctctgaccttttgataacattttaaaaaaagaaaccttacatattgactgaatcaggcctgtctccaatgaagatctaggcagctatttgtatttctgtttggatttttgggtccttttctttttgtacctctgggtaagcaaaaggaaaaacgttcctttgctttaccaaacctcatttaaaagttgtttgtatatattttttaatggaacccaatcccttaagcctttaaaagtaacctctactgagctcaataaaccatttccaatgtggcagcttctaatccaggagagttaagaaggcagatgctaaccaaccaccaattgcatcccaggacagttgctgaaagtctcagggctctgcaagctggagatgagatcggctaatcctgactctattctttcgtctgctctgctagctggccctacttgtacaattaatattctccctggtgttgattttgttcaaatatattgggcccatcaatcacccactttccaactcatctgtctggatcagtcatttacaaagttatttttgagccactaggattcttgtgaaatagacacaagaaggagctaaactcatttcaggtttgacctctgtggctgggatctgagaaggcttagtttgattacgcttcatggccatccaatccaatctggcttgtagaatagaaaggccacttgcttaattgggaacactttaatatagatatccattaacttatgctaaattacagtaaagcatctatggaggaacttgatgtgacatctgcatgaatactaaataacttcattacgatcagtactgtgacaatgaatatgaaatgaacgtgcccagagaagacaattaatctcccaccttcccaagccagtactgttttattttaccctgcattgtactaaaaaaataaggcatagaagctctatgattttctgtctatctcactcacccttcagctggtgagtggtccccgagagcttctgtcatttgtagagtggaaactgacccaccctgaggaatagccatgggcagtgggtatgtggggctcctggggacccactttggtttgggaaaggaggttgtcaagactaactgaacacaacacacacacagacgcgcgtgtgcgcgcgcacacacacgcacacgcgcacacacagaattaaaaggcatcctcatccggaactagcaaacagactgtcagttcagattagcaacatcaaaagcattccaatctgttccctgcatacattacatgcatagatctgagagaagaatttggcctctgaattaagtcagctttttccttctgggctgcttgtacctgaaatgtgtggcgaagagggtccagcagtcagattaatacacctcatagcatttagtctgaaccttacagcatggtcttaaagagacaccctctcatattacttgctgctgtttcacatgggttctttctgaatctggaatgaaccatgggacccttgggttgaagactatgcctaactctgtatgaggggtcgctcagaatggaggcatgcatgaaagaatattcctgggttctccattctagtcatttccctcctacgtcactgacttattgctggcatctcctccccttgaccttcatattggagtccttggatctcttctcaatcttatggctttaaacaccgactctactctgatgtctctcaattttgtatccacagcctagaccaccccctaaactctggactcatctatccaattgcctagttctcccctccacttgcaatgtgtaacaggcatctcaaatttcacatgctccgaaaagaactcctggtcttctcccacaggcctgcccctctcacggtcttcttcatctttgaagaagatgataaacttgtcagtggcaattttatccttccagttactcagaccaggaaacttgaagtgagtgatcctagactcttctcttcctttcacacccacatccaatctgtcaatgtagcctgttgtctcaaaatatattataaaccaaccacctctcaccacttcctctgctactttcttggcccgagcctcatcacttgttgctcagatggttgttacagtcatggttctgggtttagcagggtctctactccaggccttgtctctgaagagcctcttggtggtcacaaagctacttgccactctcatcagatcagggtgcagggtgtcatgagttttacagattctggctacaaatacctgaggtaaaaggatacctttgacattagcaacaacaggaagggagaaaattgctattaccacctagactgtgagcaaataacattctggccagtgggatatgtctcaccaatccatttacaggtcgcagacatttacaacaccagcctcctggcttcttatggggatagtggctgcatcatgtcccactgcacccttgcagctgactccatacccctattacataacacaagtctttctccttctctctttgtacccagaggctccagcatatttgcatagcatttattatgctatgtaaatacaccattatatatgaatttatagcatatgtgagaactcagagtaaatccaattccatctaaaaccacgtaatactcactgaggttcccaccacagtccccttgcttacatgtgcacatcctcaacttccactctttctcaggtcaggaacgtgtcaattctgcaacttcaagtggcagttagggaaggatcctctctccattatatgaaaagtaggtgtctagtggggaggagcttccttctgaaatgctcagaaatgtaccgatgtccttagatgctgcagatggagcccagatcccagtgagcgactgctgggctgttcacagagagccagaggcccctttggaaagggtggatctccataacccatgggaggggagggacctccaacaatcttgttagtgcatcaagtaatagatttttgacagatgctttcctgccttctagtccaaacttcaaaatccttcctgcactggtctcattggggttggtggttagttctcactttccccatttctgagaccagcaagaggctctgtttgcgccaagtctccctgtaaacactgtggttatgcccacactaggcaatgccttcctgggagataacattgcatttattccaggactcctacagggaacaggaggggaagaaaattgcctctctgtgaaagcacattacaatgtggcctagcccaagctagactcactagaaatgttaactctgccctgcactttccattccccatcccctttcctctgccttttccaagcaaactcttactctaggaaatacatgtttgattttcttgggtgaccaccatctccaagagaacctcttagaagtaggccaaggagcaaagaagaagtcccataaaggtcaagagcatcttacaggaaaggaaagtggttacggcagattgcaattgtaggaggaatgacacaaaaggggtaggctagaaccagagtcacataagaacagccttctggaggcagggggatggatgaaagaatgtctttatgtcccttcaagggttatgattttgtatgtgcaaaattctgaactgtacatccagttgaacaaagtaaacatttatcaagcatctcctctgtgtcaggcttgaagtgagaaattcaaaggtgaaccaagcatggttccagagtacaaggatcctacaaagtaaaagggtaaaaaaaaggtactttggcctcccttcttccctcccatccatccatccatccatccatccatccatctatccatccatccaatgcaaggcatattgtaataaaggagacacaactctaggcagatgtcatgagcactggaatcagattggaaaactgagtctgccacttactaattctgtaatattgggcagaaaatgtaaacaagcatagcttcaattttcctatttctataacaagaatattaatggtatctatttcatagggttaacatgggaattaaagaagataatgcatattaaagttcttggtacatagcagatgctcaataaattaatatttattaaactaatgaattacaaataaagaaaatgttagggaaacacagaggggagctcatcaatagttgaagagattgggctaaaatttacaggaaggatggaatttgagatggtcttgaagaggattttaacacatgcagatggaagctatttcagacagagggaaaaaacatgagtattgaagtggaaaagaggaggtcatggttcagggaaaggtgactagtgggaaataggactgaagatgtaggctgaggcgatatcatggcaaatctttatctctacactgatgatatagacttgatccttgggcaaaagtgcattagtagggattctggagcaaggcataactgtggtttaggaagatcaatgtggcaacacaatgagtaggattgtactgaagatgaattggagatagggagaggagtttggaggcagcagtaatctcagcgagattacgtgaggattttaacaaagctggtgacagtagaaatggaggaaatagaaaagagttattatgaactggtgaccaaaaagatgaagagaatgaggggaggaagagcaaagctgaccctgagcatttagggagaaagaattgaaaagatcatgatgtcaactctagctcgagaacacagagaaaaggcaagagtttttgcaggaaggtaagctatgtgctagatggagagttagggaccttgtaggaaaccacgtgcagatgctcagtctagctggaactatgtgcctacagtccaggccatcgtccagaactagatataaggaagtggcatcagcctcatagggttaatggctgaaagtgtgggaaaggatgtcattgaaaaggggctaaaataactcttgatttaggggactagcatggtagattgaagtagatccagtgtatagtgggctatgagaactgggaactggaaaatcaagtaggcagaaggacgaaaagctgagtgttactaatagtagaggtaaaacatgaggctaatagagttcagggactggagccaccaagggaagtgggaaaataggaaaggatgaaaagattgaagaccaagggaaggccaaaaagtaggtcaagagggagtgagaaaatgagtgaggacagagaagaactttgacaattggagctgaatgttcagtagttttgagtcgtgcatttcaagatgcaaatggggtagatgcaggtcacttgggggaagactgctgggacctgaggaggtcagaggcttgggaggactgaaatcaccaaggatgaagctggtgaagacatgggttgggggtgggggctgaaagcctggtactaaaatcctagaggaagatggagtcatgtccagaaaacctgcagatgaggtgagaagaataaagagatggtacagtggatggaaatattggggcaaattgctgaaattgaagtgagtctgtggaaaacaatatgcaggatgaatttatccgtctcctattaaatgcctcaaagagttaaagtttttaagttggagggtcaaagaacatctatggaacaaataataatctatagatgtacaaagctagcaaatattttaagtgctaaaatgtgtggtgctggtcacaaatagcttgagcctggtgcctttgaccagccctcctgacaaacagcgaacgtgccaagtcctacaaggcaccgttgcagcccaggagagctaaaatctatgccctggaagaggtgaggacttgggatgaaccttgagggaggggttggggttgaagtgggaggagcatttcagtcaatgggagagtggataaatgagcagaggtgaagtgaacacagcatattctgaatatatcgcaagaggggtgcagactgggcgttatgaaggaaaaagctggaggaagatagagtgggaccagaaagtgaagggatgcagactgacatcgtaacaattcaaatgctaatgaaatattctcaacttgagttccctgcggttgtggtcatgggccaattgcagtattcagtttttatgaagacctccagcgtcttcatgtgtggtcctcaaatcctgaatacttctctcccagagcatttaccacacggtgctgctggtatgccagcctttctccttccaccgtgagccatttgagggcagagaccagaccatctccgcagcctctcaggctacagggtaccctgcattatgcagactgagagctctagaaatatttgtggcatgaatgaaagaattcatgagtaatagccgggcataaatcagaatatgcacttgaactgggctacagtgttccaccagaggccttccacatctaaatggaagcatcatggcacgaggtgaaattctaggtttctgaagaagaaaaggtaagaaggactctcaaagcctttgttaattaaaaacacacacagctcttcagggaacatttccctgcctcccattctccctcgttgtactgaatggcagataaggtggtgtcttcgcctatgctttggaccacatttaattaaatgcctacattactgcttcctcacacaccttattttatttcctttccttccttccatgctaaagagggccagggctaatactaatgcatatgctgttaaacctttttaattaacttcaacttctcccagagatttatgtttaaacagtaaattttttgttgatactcaaatacataggcggcactcggaatgatgtacgagtactcttgtcctcaaaatgattcttcatgagttaccaccagagacgttttcatgagcctcttttattaaaataataatactcagcaaggcaataatgctttacagccggcagctaattaacccaccccaccccccaaacaggtcagcattagcatctgcaggttcgcgatatgatcgcccagtgggtcccccttgtaccttcgagtcagcactgaatcggtctgggtttgtgctctagcatctgtgaataatgattttcatttaaaacacatctttgttcttagactgtagctcaatctattattattgttatttattttgttcttgttagtgccttcctgcactgggtatcagtatttctgatctgcagttgacctcttgaaacaaaatttaaccatgccttggaaaatccaattgatttaaaactcttgtctaattgcaaaatccatttatttttctgcaactctaaatttgtgccccaagtatttttttttttttttttttgagacagagtctcgttctgttgctcaggctggagtgcagtggcatgacctcggctcactgcaaacttcaactcctgggttcaggtgattctcctgcttcagcctcctgagtagctgggattacaggcatgcaccaccacacccagctaacttttgtatttttagtagagacggggtttcaccatgttggccagactggtctcgaactcctgaccttgagtgattcacccgccttgggctcccaaagtgctgggattacaggagtgagccactgcgcccggccaccccaagtatttttaatcatgatctatgctgtcaattgtaattgcaatgtagcaattctttgccaacaaaaccaatctacctacccaagctcctgttcttttcttcatgttgagacaacgtttttccccacaagccaatgtggtcatatcacatgttgcaccaccgatgagccaattatttcaattttggcatcagatttaaaagagactttaatgatcctcaatggtataaactgaatttttattcctacagcaatttagtaatgatgatgacacttaagcatttagaaagtattactcatcttccaaccactgacaaacaggaggctcggcacttttcattttaggcacttttctaggcaagtctgatggggacctcagcatggacagcatttcacaatatttagggagcccaggctcacccctgctactctgccaggagctatagaaagaaaaatctccaagccccagtgcttgtctgctggggtttctagctggaaatcagaataagctcccaagccttgcatgcccgttttaattaacttgtctattcacgcatccaacaaatatttaatgagtttctgctaggtaaggaaacccagccccaggagggagactgagatatatgaggtatacccctttccctctaatcaaattcaaccccacccctctcaccagggtccaagttatttgaatacttcatttatgcatacgtttactcctttcattcagcaaacgtttatcaggcaccttttagtgtaaggtactctgctgggagcccaaaagtttacagcgaagatcaaatctgtcagcaaatccctttggttcttccttcaaagtaaatttggaatctggtcttcttgcccctccaaggctaccccctggtccaagtcacttggaccctgtgcctggatggcggccagagcctcctaattggtctcgcagcttccatccttgtcttctgctgtctagtttcaacagggcagtctgagtagtgcttttaaaaacctaagtcagagggagccgttcctttgttcagaacggtgcagagcattccatctcactgagaatgaaagccaacaccctctccatgactcatggtgctctccggggtctggcctcgttgttacactttgacttaatcttcactcttccttttgcttgcttatacagtttggatttgtgtccccacccaaatgtcatgtcatattgtaatccccagtgttggaggaggggcctggtaggaggtgattggatcacaggggtggatttcccccttgctgttcttgtgatggtgagttctcacgagatttggttgtttgaaagtgtgtatcacctcctccttcacttcttcctcctgctctggccatctaatatgggcctacttcccctttgccttccaccatgattgtaagttttctgaggcctccccagctgtgcctgcctacagaaccgtgagtcaattaaacttctttcctttttaccccgtctcacgtacttctttatagtaatgagagaatggatgagtgcacttgtgctggcctctttgctgttcctgaaactcaccaggcatgctcctgcctcagggtctttgcacttatgcagttccctctgcctgggatgtcctgtcctcggtccctcccctgcttcaagacattgctcggtggccaccttcttggggactgaccatcttatttaaaatgtgcaccccacgcctataggagtactttatatccctctccctgttttacctggctgtagagtgcctatctccatctgacatgattcatctttatttgttcatttcatgtctcctccactagaatgtcagccccatgaagtcttagctatttgttttattgactgatgtatcaatgcctagtgcacagatatttaaaatttgttgaacatatatatgtatgtaatgagtgcatgtaataaatagtgctgtgataatcttcaagaagcacatgatcaaataggaactatatctaaaataaataatgagctatgttttaagaaagctagaaataaatatggtagcccaaagggtagaaaattcattttgcctggttgaatgagtggctaaaatcacagtcctacaatttcaggtgtgtcatgttggaaaatgtattagtcagttttcacactgctgataaagacatactcgagaatgggaagaaaaacaggtttaattggacttacagttccacatgggtggggaggcctcagaatcatggagggaggtgaaaggcacttcttaaatggagatggcaagagaaaaatgaggaaaatgcaaaagtgaaaacgcctgatataaccatcagatcttgtgagacatattcactacccctagaacagtaagggggaaaccaccctcatgattaaaattatctcctattgggtccctcccacaacacgtgggaattattggagtataattcaagatgggatttgggtgggaacagagccaaaccatatcattctgctcctggcccctccaaatctaaggttctcatatttcaaaacctatcaggccttcccctcagtcccccaaattcttaactcatttcaccattaacccaaaagtccacagtccaaactctcatctgagacaaggcaaatcccttctacctatgagcctgtaaaatcaaaagcaagctagttactccctagataaaatgagggtacaggtattgggtaaatacagccattccaaatgggagaaattgaccaaaacaaaggggttacaaggcccatgcaagtctgaaatccagtggggcaaattgtaaagctgcaaaatgatctcctttgactccaggtctcatatccaggtcatgctgatgcaagaggtgggttcccatggtcttgggtagctctatccttgtggctttgcagggtacagcctccctcccagctgctttcacaggctgacattgagtgtctgcggctcttccaggtgaacggtgcaagctgttggtggatctaccattctgggatctggagggcgatggccctcctctcacagctccactaggcagtgccctagtagggactctgtatgagggctctgaccccacatttcccttctgcactgctttagcagaagttctccatgaggttcccacccctgcagcaaacttctgcctgggcatccaggagtttccatacattttctgaaatctaggtggaggttcccaaaccccaattcttgacttctgtgcactctcaggctcaacaccacatggaagctgccaaggcttggggcttgcaccccatgaagccatggcctgagctctacattggcccctttcagccatggctgtagcggctgggatgcagggcaccaagtccctaggctgcacacagcgtggggaccctgggcccgtcccatgaaaccattttctcctaggcctatgggcctgtgataggaagggctgccacgaaaacctctgacatgccctagagaattttctccatcatcgtggggattaacattcgactcctcattacttatgcaaatttctgcagccagcttgtatttttcctcagaaaatgggcttttcttttctattacattgtcaggctgcatattttctgaacttttatgcttggcttcccttataaaactgaatgcctttaatggcacccaagtcacatctagaatgctttgctccttagaaatttcttccactagataccctagatcatctatgtcaagttcaaagttccacaaatctctagggcaggggcaaaatgctgccagtctgtttgctaaaacataacaagaatctcctttgctccatttccaaacaagttccttatctccatctgagacaacctcagcctggaccttattgtccatatcactatcaggcttctggtcaaagccattcaacaagtctctaggaagttccaaactttcccacattttcgtgtcttcttctgggccctctaacctctccctgttgccaagttccaaagtcacttccacatctttgggtatctttttagcaactctactggtaccaatttactgtattagtctgttttcatgctgctgataaagacatacccaagactgggaagaaaaagaggtttaactggacttacagttccacatggctgggaagatctcagaatcatggcaggaagtaaaaggcacttcttacatggcagtggtaagagaagaatgaggaagatgcaaaagtgaaaatccctgataaaaccatcagatctcatgagacacattcacttccatgagaacagtatgggggaaaccacccccatgattcaaattatctcccaccgggtccctcccacaacacataggaattatgggagtacaattcaagatgatatgtgggtggggacacagcaaaaccatatcagaaaagaactgcaatccacgtctaaatgagaaaatggttccttgctataggatttctcagctagactaagaaagtcttttgggaattggtgggatggtgcacagtttgcgtgtttcactgagtcttgataattattccaactgggaatccctctccatcttccccaaatctcacaaattccagtgataaactccactccatgtctcaaacagggactatttttgagaaccatgcatgctctttccagatatcagtggacagcatccaggggggcagagtcagtgtaatttctcatggctgattttgacaggagatgtcaggttagtcttagttatcctggagcctaactggatcttgggaataaatctcttattttggtagcactttcaaataagtggcagcagttcatgcataattacttctgaattatctaggggatttatcaggtttgattatagatgcataatgaatttaccaaatttgtgggtattatggagatattaattccatatgaaacctcacaattcattcatgtgccatttgttttcattccttttttataataagctaattagtttaaattatttgtacttgtacaaggtcttgaaacacatattaggaatgattataccagagaacccaataaatgagaagttttggagacagcattaattgtgatgaagggttcataaagcagtggatgttcaattttcccatttggggtggtaataacaggtctaatcatgacacctccataaagtcatgggaagtccctaatgaaagtttctgaattcagatatttaaatgatggtagggtaagtcattatgccaatgggagaatgaggcaaaaagcggagttcatccttgtgctaaccaaagaaaagatgaaatggtgagggctcatcaattctgggccaggaggaagataggcactagtaggtctgatctgtctggaggattcctttaaaaaaacccaaggttctggaggtcactggcaggctggaatttcagcccctcagagtgaagggatgggcttctttggttgagttccggtgtctgttaaccccccaccccttgttctttgtgtgaaaccagcacccactggccaaaaagcccgggttggggtctctgtgggttgatggatataaaccatcttctttacttagggcacaaagaagaaccaagacaggagaggaagcctgggccaagcctgcctagggagtctatcgtggtaggaacaagagctaccatgccttgagcccattctaaatggtaggcaagtgctagatatttggctcacacatttcatcctcataacagccctatggtgtagagaatatcattatctccacttcacaggtcagggggctgtggacaagaggtcaggccatttgccaaagtcctccactcaatctataggtagcggggctgggttcctaaggatgtctgattctgaagcctggtccttgatctctgtgctccatgaccttctgtaatccccacagtctcccaaacatcaatgctgtcattacaaccccatcacctacccttacccttaccacaccaaagagttactcttttttgaaatctgaatctcagattttcactttccaggcaattcaccaggacagaggcctttcaactttcctccctgagatcttcctccgtgaaccaacaacaaaaggaccagccacctcactggtcctctgttgccagtagaaaaagccctacaaggattaatgcaagaagaagttctgctttgggtgagacatcagtttaatttatatttgattaaaaaagtcattcattcatgcattcagcagccagtatttgttaaatgtctcctacactcttaattgggttttgtcgggttgtgggggtgggggaggggaaaaagagagcaggtataataaagcttatgccagacaccttgtttgtaattgtcttgtgaggaatatatgtacacaactgaaaagttaagtaaacaagagaatgatggaataactaggcaagtgagagaggcagacagtgcactatctacagaatccaacggaggaggcggtactggggcccgtggtggcagaggatgacggctttgcagaggcagaggaacgactgacttgctcagtgaaggatgggcagacttggggtggcagaagaggcaccagctggacccgcccaggaagccaagcccctgtgctgcctcagtttgtaagtaggcatttgaccttgtggggaatcactctctagcgcctcaccgtctttgctgtaagatggagataatgatacctcatggggttgtcatgaaattcaaatcaggaaatggatatgaaatggttctgaaagatgtaaagagcaatataaacaccagatacggaatgagaaaaaagcggcaccggaagtggcattttgcaaactccaatcccccaggaccacatgtgaaggagctcttttcaaggtcacacggacactctgacccgactctctcctggcagcattcaatgtgacacgccagggcaatgagaaacgggaggggctgcgtgagacatggcaaggctgaggccaagccccaaagttcacggacattccataaaaagtgcacggtggaacctgagaaggtggagaagggcagggatgcccctggcactttttttgtctctggtgctatcaaacagaaaatgtcacctttgttcctctatagccatttttagttgcaccaaaggggggagttgaaaaatagaccttgtagctgcctccatgcgattcaggggaaggtgataccacttctgcctagagggtgacccccacgcccagcacatatctcaccctcagtcacagcgaggccacagccctcgattctagaatctgatgtccttgaatctccctatcacgggctcccagtttcaagggcctctggacacatgaatttctactttgagaatcagtttggctgtgtttcggtatctgcattcagcttcacaaggctggtgagcgagggctcgtggttgggacacctgacaggtggcggggaagacctccactggggacactgattttattgctagaagttgctaaaggatgagcaacttagcagctaggacttttaccacttcagtgatagaatgtaaagtcaaccccgagaagatggatctaggatacctaaactgaaagtttttttttttttttttttcacagcatattgcaatgcaacagtgaaaggaattttaaatgggcagcttctccttttctcctacctccaggcatctgcctctgaaatgttgaaggtggagggagataggattggcctttctgggaagacctctaagaaaggggtttccattgagaagaaactacgggtaacagttaaagaggaagagcatgtgtaatgtaggaagcgcttttgcttcagatagatgtccttccctcaccccagagcacagtaaccctaatgctatgtcctgcatctgtctggaggggttgtctagcctggcccacatcctgagccctctccacatgggcaaccacacagccgacatcgtgagaggtctgagcccctcagactcttgaaggtcaatggatattgtgtatcttttttctacactgcttcaatgcttttcaaccattatttttttttatttttttatttttttacaaccttgagtgttttaacgatttgcttctttaaaggctttgcttccctctgaatattatgactagcctattgggtcagaggccaggagtctgcagaggaccattcattcaccccagaggccgctccttgcttttatcctgtcctcaacatgatagctcaaactgccagattttacataggaggaaggaagacaccgaaagatgttcctagctggcacaggctgtgctgaacacaggtctcaccccactgtgggcaggtggtggtggagcacatctgtctctctccgtgttggtggctgtgatttggcagctctgccgaagatttgtgagatggagaagaaagtgcagggttggggtacggggaaaggggtaagaaaggagattagtcacttgagtcaggataatttttcctgatgtcaaagcctcacccaggagagctctcgctgttgcctgcttttatctggaaaacaatgtgagcagtatctctcaaaattaggtcagggcttgcagaggcagggacttgccaaggtgctaactgcctgaatcctcggtgggtttgcacagctctctgctctgacaaatgcctcctttgtctccctgaaaagcctgcctcttttctccttcacccctccactccccccacaaacaactgaatttggaaggttaaaaatcacttcacttgtcaactcgaaagctctccctcccacctcaagttgtttctcttcctgcccagggaaggcagctactgtgtgtccccctggggactggaaccactttgcaaagagcgcagatctgcagttttcacaacgcagttgtcatctcgggagcagtgtgtgcccgtccaccctgggagaggcttatgaaggctgtgtctcaagcatttcagggggctgcagatttagggggacagtcctggtggcttggtcttaggcttgtcttggctcaggtttctgtgtggcaacagcatgataaaaattctgtccactctaccaaaatgggagaagcaatagcaagacagcagggcagcaacagtcagttcttgtctggctttccaggacaacgtgactttctcttattttttgttcctgacactgtttgcactgactaagatatcacgatgatgaaacactgttgaatctaaaaggtgggtggggctgaaggaggggtgggaggaggccttagaagctaattagaatcctctagaagtgtgtggaaatgggaacctgagccaggagagtcctgtggattcactagattctgggactataccttatctatgctgtgcaaaggaataagaaactagtgctgtctcgggaaccagcaacacagatgttcccaggagcaatgtttgcaggtgagtgaggtcagggagggctacagagttaggactccgaagtcagaaagatgcctgttggttctgccgttcatatctgtgagatatcaggctggtttcttaaccataacctccatgattcagtttcttcatttgcaaaataatttaaataagataatatgttgaaaactcttagcacccaataagccttcaaaattataattgttttgtatgttttggcaagaaaatagaataatattattattggagtctctggaaaacctaggtttccaaacctttcaccttaagtagatttttataaaatgagacttcacgtggaatctcaacatacaaaattggcataagtgggggataaggcagcaggtgacagtggttgcgtgctcctgggcaccgcctgcccagcccctgcactgattgtcttacccacaggggcagtttaaatcttcatgcttttaccaccttatactgagtaagaagatgaatttgcacagatttctccctgcataatttctccgtatctttagcacagtttggtgatgacttttaagctttgacatcatgtactcataacctatctcttatgaaaataaatgaaactggctaggcgtggtggctcatgcctgtggtcccagcactttgggaggccaaggtgtgtgcatcgcttggggctgggagtcccagaccagcctggctgtcgtggtgggaccccgtctctactaggaatacaggggttggctgggcatggtggtgtgtgcttgtggtcctggctgcttgggaggctgaggcatgagagtggcttgaacccaggaggctagggttgtggtgagctgagatcatgccactgcactccatccagcctgggcaatggagtgagactgtgtctcaaaaaaaaagaaacaaaaaaaaacagaaaaaataaatgaaaccatgattttctctcacactgtattgtgtttaattttcatttgtttattctataaacatgacaggcttttgaactttgtattacctatatattttataatagatcatgcataatctctcaggagaataaaatgagaattccaaataaataattaaataaataaataaataaataaataaataaatcttcatggaatctcaaggctctgaggggcctagttagacaactgctggtttaaaatattagagaaatagtgggccagttccaaaaaagtagagccctgatgacatccagccagttaacatgttttagtaaccaagcaaaccaacccagaaagacatggatcaggagaaacctccatatgtggcagggcacaggtctgagaggtgagtgctggaggaaccaaggccagagtgggacaagctgtttagcaaagaagggcagtgtcattcctcttctcacccagtgtggggctgggacgtgtgggaactcagggcctgtagatgggttgggggtgaggtggagtagggagatggagacaatgacacagagacagtccgtccccagcccaaagaggactgcgctagcttgggagggaatgagactcagttggcatttctgcacatggtctgggtggacctgcgcaactctgattgtgtccatgtagaaacctgtgctgtgttcagtcactgtaatgcttttgtagttctatggctttttccccttttgcttccccttagttttcagagaaattccaatcaggctttactgctatctaccggaagagacaagaaggtaatttgaccagatcaagaccacccagcccagcagagcgcaattcatgaccagtccacagagctctcctcccggatcccatcagtttcacagagaagatggcattgccaaagcctggggctgctcacccaatccctttgtgtctgtcacagctctcccatttctggaggagtcgagttagcccctccttctcctttgaatctcttctctttaagactcgcagcttcaatacccaaatgctgccatgtctgtagtggtaatgcttggaataacaagtagttattgtcatacaagaagaataaggaagcttttgatgatctcgaataatgtggatatctacatcatttttgcatgtcagtgggtatacccagctttgagggaatggttatttttatacctttcaagacttggtatgcttaattatctagggaaactcataaccccaacttcctaagccactcctaaagaaaaagcacagatgcagtgactaaaaactttctggcctccttatacttcatctcagggctggaggtgactcagatgtaccttgctattttcatgatccattggtgtctcagtaatgaatgttcaccactgcagtgccctcatttagcctaataacctcagtaaggtaatgtttgatttgtgctaagtatctgattaaacaacataaagtatttaacctattgatcttttatactttgccagccctacattgctggatatactttaattactgactcggagagctttcctgaatgggatctgcatctcgttaagactttttctttgtctttaaggtgccatatcaacagcttctccttcttgttgcctctaggcttttcttccacttcctgctcctccgccagaccctgcttgattctgcaagactgacgtttggttaatctactgaaagtagagtcctttatgtaaccatgaatcttactgcttattttagaaagtcaatgaccacataaacaatcggacttgttactttgtccaccctgatctttggagcatgggaagttgtccaaagtgacaaccccattttaggcagttggtcacagctgttggatggacctaacccttctatctcacaaggagacgaggccagtgggcatccatcaagagaaattataggaaaccatttagactggccaattggttagctaattgctctagtctaaaccacttcttagaaaactacagaaaatgatacattttccctcttgcctgcaaggatatagtcatgaacgttaataataattagctgctttacatgctgtcttttcttcaagaatctcagacatggtgagtttatttattttttctcttattttaaaactagatctacaaaggctgagatagcttctccatgggtcctcccaaaatgagagtgacacctcataggattaagagaattcaatgagaaaattcatattgaacacttatcataatgccactgagtaagcactcaaaaaataggagttatactattagttattattagttatatcatctaagaagcctgcgacttgtgggttgcccatgaatttctgaatagagtcaggctgggaggaaggcacactggtccaagtgtctagttactttgtccagaccacctgataaagactgtctcaccctgtgtgccaacatcctttggtctctgctggcccatcacacataggtcttggacaaaaaagagtggtttgtggaggattaaaggtcatgaaaaggcgaacattcaccttcactcaagatgctgcccgaagtcagatcagaagcagagtcagaatggctctctaaacagcttctcaaaggatgccttccacgggctgatgtgcttgataacaatgcaaatgcaaggaacatgccccagacaactgaactggaatttctatgagcacagcccaggaatttgcaattaaatcaagctcgtgggtgattcttatgttcaataaagtttgagaagcatactactaagtgttgcctttaaaggcaactcgaaaacttgcagaaaacatctaaagaaggctggaggtggcctggtgcttattgtataagagcatctggcaagctccaccctctaggtggcattctggtcttgaaaagcatgataaaaatttggggttgctactaagcagggacaattgcgcagcttgtggagtggcttggagacctccaatagccctgctaggatctggggcagacagtgggcaccagccgatgccagggtatgtgaagggcaaaggaggccctttgggggaagagaactgtgaggccacaggactactgaaatagagctccatgcccttctccattgcctctgtaaataccctggggatcacttttactctattttctggcttctctgtcacttgtggtgcagttgggatgcttactttcacttccaaatgatgatacctcagagaatgcaaactgtaatgcacataagacacagacaatccatggaaaacatgatactgctgagacgtaggcacatgttcacactgacgtgcattgcatcattgcatttgttccaaagccggtaaaaatgattttcagataatctgctattttggatcgtctgcactgctgcttgcttccattagcatggctaattgagaactgactgtgtgtcttggaccatttccaggaagggaacccattgcctgtataatacaggctccctgagagagccaagtaaatggctggaaatgtcaggttgaatgcccacattggaggagcaaacttttgaggacgacctgaccattctcaggccagagaagcaatcttgttcagcatgtcacattgattgccaagtcagtaaaccataaaactgtcccacagctagaacatgcactgactctgagaaagatgaggcttggttagtaaaggatgaagccattccaagaccaataaaagatgcaatatggttttccctgggctgtatattaacaccatcctggcagctataggggatagaggcttggcaaacaactgtgttttgctttgacttttgcagagtgaggatgagatagaggccaatggggagatcatctgaggccagatgaaaggcttggaaagagtaagtctttacagaaacctagtctctaaagaaaccactgatgtttatgtgtcttggccagtgtcttctgtcatataacatcttggtgaaataccccaaatagatcttaaaaccaaaacatactaagaaaaaaggaaaatagaaagcacaatgttgtaactgccttctgggtaaccatgttttggatggtgtcatttttcttatgacataagctcccagatggcacagacactgtgtctcagaaaaaatagcaactagcagagggtcatgcctcatgtgagtttctgtaagtattgtttggttgtgtgttgtttatcacaaagagaacagatactattgtcagacaatctcaccagctgcattttgcaagaagaatgagagaagtcccctacaacttttacaattctgtgttctgtcccaaataacgacgagagatgaatcacctgggctgaaggataattgaaggaggaggcacattactcaagaaggtcagaaagcctatgtctaggattaatctgtgctcatggaatcgtttctatgtgttgctaatagctagagggtctgctgatttcatctgtgcccagtcaactccctgggcccacctctaatcaaaagcagaggacataaactgtgaagatttccaggatggatttctgaggacagctgtctatagcttcagatatggcactagacacagtggtgctcatcattggctgcatgttagaatcacctgagggagctagaaaactatggatacccaggctccatccccagagattctgatttaattggtcagggatgggtcctctgtatgaataattttaaaaatcacctaggagattttacttgcaagcagggttgagacagcccgagctaaagcctctttagtggtatgagggaaaacaggaggctctggctcagttcacaaagttgaagatcaaacccagccttcgaaacagcattcttcttctttacaggatgacaggaaataaaagactgtgggagttggggtttgggtaaagaggaaagaagggaagggagaaaaaaggagagagccaaaacgcccattgagaggaagggaataagattgattttcccctagtagtttttattcaaccagggtctgaaatgtgctcagtctacctcatgaaaagtgtgtcacccagggcacactggtgtttctatcgctagtcacagaggcttcgggcaactgctgaatggcagcattagggacccataaaaggaaaaatgcattgctatgactaagagcccattaccataacaattgtaaatgactttggggagtctgcccattgaccatcaaagaaaccagaaaacggggccaggccccttggagagcactagaggcttatgaaagccatgcactggtaatgttagtgtcttagtcccttcgtgctgctgtcacagagtacctgagagtgggtaatttataaaaaacagaaatttatttcttacagttctagaggccgggaagtgcaagatctagaggctggcatctggtctggtgagggccttcttgctgcatccttatatgcagaaggtggaaggcaagctagaacaagttagccaaacactgcataaagcctcttgcataagggcattaatcccattaatgaggaaggaagtctcatagcctgatcacctcttggaggccccacctctcaatactgtcacgttggcaacacctgaattttggaggcgattaggtttcaacatgaattttggaggagtccaaaacattcaaatcctagcagttggagatagcaaagcacattgtatgatgtgacaagaaagtcacatggaggcagaaaaagaagaagagacccagtgggtcaccccaacttcaaatgggttctcaacattaactttctagagtgtaggattttactttttccaaagtcctttctttttttttttttttttttttgctccatctctctgattcttactcatgtatttctactcagaactggagccaggaatccatactccctgttcactgtcccttctggcagaaatactatggaagagcagatgtcagtgatactgcccgatcttggcaagggaagaaccagcaagaagagtgcagggcatctccacacgtgggactgatgagcatggggagtgtggagtgtgagaggcaggagagggatgtgggggaggttttgatatcatgtctggctttttttttttttttttttttgagatggagtctcgctctgtcacccaggctggagtgcagtggctcgatcttctttcaccgcaaactctgcctcccggggtcaagtgattctcctgcctcagcctcctgagtagctgggactacaggtgcatgccaccacacccggctaattttttgtatttttagtagagacggggtttcaccatgttagccaggatggtctcgatgtcctgacctcgtgatccgcctgcctcggcctcccaacgtgctgggattacaatgtctggctttaacaagacaaagcttttgatagtttatctcctgcaattcctggttttctctaaggtggtgctggtttctactacacagggagagggatccacttgtcataattaaaacatctcatggaagcgtatgcttctgtgctttcctggaaaatgtactaatagctggggatggcaggttcccagggaagtggcacatgacatgtcaggggagtccagcaatggggaggcacaactcctaggcccttagatttgtagcctctgaacccattgcatcctggagccagttacagatttcatctgagggacaaaaggagagtgagagacttggaggctccctttggagctctctggcaattcatgattgttgagcaagaaagatggggaatgaggaattagttttcactgaattgccacagggcctgctctgactataagcataggagagccaccccagtcctgtaaagccctagagttgggctagcaggggaaagcacaaggtctggagattggaaggaattttcctgagagtgtgtgtgtctgtgcttttgagcctgtgcccctggcacaagggaaattaaccagactctgcatgttgtgggaattctgcatggcaacctaatagaggcttagcttttcattaaaatttccattaatactggagctgtttagagcaagttgaatgggaatatccataatgcacctcctatcctctattaccattctgaggatcagagtgaggtttcaggcttttgctggggccattagcattttttttttttttaccatcattatgatcatcaacccagcaccaattatgtagagcaggcaaagtacaaagaggctcacacagaacctatccttgtcctatgtgacaggcagggcaagagtaagagagcaggcacgcagaggcagagagtgaagtctagtgagaccacacggacatggactttccagtgttgagaagcacctccttcctcccacctgcctactctaaatgaaacagctctgtcatactgggctagagcaatctcaggtgcagggaaggcatagatcttctgttggaactggggatactgaaagggatgaagaagttcggcctcacctcttgaggatcatttctacagcagagctgcccagaggatcaccattgttaccagctccgatgtgcccttcctgcatgccaaagccagttctctcttggagatggccactgttgctctctgggctgtgggacatctaggaagctgatgtccttgtttcagggtcctgggaggctgtttcaatgacatctcatagagacactttcctttctaaccctggctgcagcctcatggcactacttcctcatctatgaacctcttgtgcccttagacaggggggcattccctgcctcaaccacaggtagctggagctcattctacagtgtccagagtgaaacctgtcccctccaggcagaatgaactgtgctcttactctgcagccttcgacacattattcataacatgatgattattttggagtgcgttcttttgcttctcacaatgagcagacactctactttatccagcttgtatcctctatgctaagtgcacagcagattacatggtagttccttataaattttttaaaaattgttgtagatttccttccacctgcctgaggtgaggctcaacactgttactgatgaaacagtccatgtgtggaaaaacagagcccattaaaaagaaaacccaaacacagctaatagtctgggaatggtgtctgcaggatgatgcagttgacacattctgtttgtgccacacgtgtgttttgtcactgagactgccagctctgaggggaaaaattctactataagaatatttaaaataagattgagtacagtggctctttgccaggtgtgtgtttcaggaggcattttaatgagaacatgctgtcatggtctgaatgtttgtgtttctccaaaattcatgtgttgaaatcctcacccccgaggtgatgctattaggaggtggggcctttgggaggtgattagggcatgagggtggagccctcatgaatgaaattagtgaccttgtgaaagaggccccagagagctgccctcttccaccatgtgaggacagagaaagaaggtgccatccatgaaccaggaggcgggtctggaccagacatcagatctgccagcaccttgatcttggacttctccacctccagaatggtgagaaatacatttctgttgttcagtctaagatcgtttgttactgcagcccaaatggactgaggcacatgcttcagccccagtggtgaagagcacagactttggaaacatgctatgtggacctgaggtctgcctgcaacacttagctgtgtgacctcaggaaggtttcttaatctctatgtgcattcatttttcatttgtaaaactggaatcataatagacccatcaccttgtgccattgtgaggatgacatgaggtaaaaatatatacaaacttagagtagtttatacttatactgtgtcagtctaaagcgttgttgctattaatgaatcagaaagcctggaactatgatctggacctttttattttgaaggcgctcctcggagattctgatttgcatccatggttcagaaccacttgcctactgcattgtctgtatcatagaagttgaggaaccattaagcattaataaataagtgcagcaggatcttggttccgcaggaagagtgtggattcttggaatgcaattgtcatgtggcaagttatttcaggttttcttgttatcctcctccctgtatctataatggacagccttgggttttacctcctgtccaggcacccgttcctctttctgcagggataagagtgagcatggaagtacttaagcaccagggaaaggggagaaagaaaaagtgggggtaatccaccaactgtctaaccatttcctgaaaaatagagggccaactaccattagagctcttagaggattgctgagccttctaagggtttaccaagaagggacaaatctaatgataagaaagttacagccaagtttattgaacaataacccatttccttcatgtagaaacaatgaagaaacattttttctcacttacatggcacaaggaaaacaatatcaatgatttgtgctgcctgcttgtcgagtctgtttaccaacttggcttatttttttactgcatgatatgaacacttagggttaaacagagctctctttttctctctggtgaggtttttgcttttcccatttttatttgtattgactaggaggtctttcaccagaagaataaaagaccatgcttttgaggagccagtcactgagtttctctgttgatcaatcaccattgctggtacaggtatattcattttgggtctgggatggatacaggtttgatgaaaggtccctggggaatgagagggcttagccaacagtctcagggtcagcatttcctagtcctacaagattcagatccctgatgtggagccaaggaaaggcttgagtgactaggggtctttttgaacaaggcactttaatttgccaagaactctacatcattttgtacaatttatttcagggagagatatcactttaagctaaaaaacaaaggaaaaaagctccagactactccatgatggaggacaaagcatctcagtaaataactttgaaagtcaagagttacaggaaataaaaaaagaagacaatcagagaatgtgccactaatgaattcaatcgcagcaaaagtccatttccattcccttgaactctacacaatttccagttgcaaatatctttcagaagtactgtacacacacagttggatattgagttgcttgacaaacatttctgatcaaaactgcttgcctagaaatggctgctggagcaacaataatgtggatttagaatgagccgggctgtttgcacataggtgtagtctatgagtttaatggagttttgcagaaggcaattgcctagaaaatagtgggtttttaaggatgaacttttgactcccaatgcgaggtgaagggaagatcgggggagaatagggagagaagggctgtcttttctgttttctctggggcaccatggctataataacttctactttgctgtgatggactcagcaatcaatttattctacgatcttttcccagacacactctcaactcatgtcggcttagttgaatggtcaccctacctggattctgagacccttcttggggcctcaattgggatatttacagcttccatttttgagaagtgtgtgtgtagaggcactaatttaagaacaaaaaaggccagtgacatctagggaaatgtcttcactttgggcaggagtgggatgaccctctgaaagctgcacaaaaggccacagatctggccgatctgaggagactggtgttttctgatcttgggacaaagcagttaaaatcctggagctcttgcatcttggagaaaaatcctgtagcttctttctctggggcaaggggcaaggctgtttggtcacactgtttagtgattcacagctgggaatcttctgtgtctgaacaatttcagcccctcataaggggttgatagctgagcccctgtgtcttagtcagtttcggctataacaaaacaccataaactgggtggtttataaacaacagaaatttatttcttacagatctagaggctgaaagatcaagatcaaggtgatggcagatttggtgactggtgagggctggcttcttcataggcagtgccttctctctgtgtccttacatcgtggaagggacaagaggcctttcttggacatctttcataaaggcactaatcccattcatgaactccgttttcatgacctaatcacctcccaaaggcctcacctcctaataccgtagccttggaggtgagaattttagcttatgaatttgggggaatataaccattcagaataaaacaccctggctatagaagagaggtggcttttcctctccccagacagcttccctttccccacagtccaaccggctgtctaagcttagggagctgcccctggggaagaggagccctgtcaactgcacccggaatgatggcctttcttcctgttcttcctcgttagtttcttcccacttctctaggatgacagagaggccccccttctcggttttctcagatagcatgccatttgctgtctcaaatctataaagagctgttgggaagtttctgtttttctttctttctttctttctttctttctttctttctttctttctttctttctttctttcttttttctctttctttctttcaaaaaagttcaattctcctaggtggctcacctgggcttttaataatgtttggctccattttaaacccctggctctgagtgtgctgctaagaatctattcctataggcgtttggtcattgcagggttaagaaaatttgagccgttcctttcctgcctatgttggggtgctgggtactgacagtaagagtgtccaggatgagggaatgcatgtttccagtgactcctgaagttttattcacctgttagggctttccatcccaattttcatccctttttgacaattcttggtaaaagctttgcaagtatggagctaatcaaaggatttctggctcccaacttgtctgctctttgttttgtttttgctttggttttttgcttctctggggtatgggtcttcatcttgtttgttatggcaagaattccctttagtgactagtgttgggagttgttagacccattgaacagatgaaaataaaaggggtctctagatctgggatcctggcactgagtgaagttttccttcagcgtatttcaaacacgtgcaagatcttcctccttccctgagacacttacctctcctttagttctcaggtgttggatcatgtcctctagaaaacttttccctatttaatcccatgtatttttaacccactaacataatccccaatgtttccatgtctttagttaatgcttgtaatatctatgtatttaagggcttaatcatgggcggttagatttttaacttctggttcggactaatacatcttttccagtgcatgggtacagatctcagtagcacacatggaacatttgctaactccgtggttgactcattcaagccctcccacgagtcagattacccagtcagccagtaaatgttggaggactcctgcacttcctcgtgggcttttctctcttctccatttacatttttctctcaaggttttgcatgaaactccaaggctttaaataccattgagatacagatgattttttaaattataaatccagtcttgacctatcccttgggctaaagatttgtagagtcaactgtcttcctaaatctttttttggaggtctaataattaccgaaaactgtaacatgtacaaaacagacttgtagcccccaccctgcacatctgtctctctcccagtcttcagcatgtcagtgcattgcagcaccatccaccccgttgctcaagctcatgcctcagtctcccctgactcttcccattccttctcccagcacattccacacaccagcatgtcctgttggctcttgtttcaagatacatccagaatctgttcacttctctgcactgccactgttccagtccaagcctccatcaactcttgcctgagcttctgtattagtcttcccaactggtctccctgcttctctccttgccacctaaaatctatgccccacatagcaggcataatgattttaaaaaatcagcatttgaccaaatcgaatggctgttcataataaaaactatcaaataactaggaattgaagagaatttcactaacttaatataaagagtataagaaaaacctagagttaacatcatacttaatggtaagagactgaatgcttttgtcctaagattggaacaaggtgagaatatctgttctcaccacccctattgaccactgtactggaagtcctagcttagtgcaataagataagtaaaagaaataaaaagtgtggagacttggaaggaagaaataaaactgtctttattctcgggtaacataattatctacataaaaaacccaaagaatctgtaagaaaacacctagtaagtcaatatagcaagattgtaggatacaaggtgaataaacagaagttaattttttcaatagaaagttggaatcgtggtaagctgcctaccttgccccacccttgggggctacattttagcttttactgaatggaatgaagaaagataaatacaaatttgtgtctttaacgaagaaaaaattaactgctttcctccataccaaaaataatctcaggaagtgattttgtagatacaacaaacttaatgtaaattttgtatagaatggcgaaggacctagaacagtcaccacaatactaaataagaaataagttggaggactcatactacctgatttcaagacttactataatataaagccacagtaatcaagacagtataatactggtgaaggaatacacaaatagatcagtggaacaggatagagagcccagaaatagacccacacaaataaagggacagtgttttcaacaaatggtggaggaacaattggccatctatattagaaacagagactagacacagatcttacatccttcataaaaaattgcttaaaatgaattatacacctagatataaaacatgaaacaataaaacttccagaagaaaacactggagaaaatctatggccttagattggtgatgagtttttctccttttttttttttttttgagtcgaggtcttgctgcactgcccacaccactcttgaactcctgagctcaaaaaatccccctgcctcagcctcctgagtagctgagattacgggcatgagccaccatgcctggttggtgatgagtttttagatattacaccaaatgcatgatccataaaacaaaaaattgaaaattttggctttattaaaattaaaaacttttgctctgctgaagacattcttaacatgtgaaaaagacaagtcattgaccaggagaaaatatttgtaaatcacatatcagataaaacacttgcatctaaaatataccaagaatcctgaaaactcaacagtaagaaagcaaatggtccaacttaaaaaatgggcaagagatctgaacagacacttcaccaaagaagatacacagatggcaaagaaacatatcaaaagatgatctatagcatctgtcattagggaaatgcaaattaaaattacaacatacctctacacacctcttagcatggctaaaatccagaaaagctgacaatactggcaaggatatggagcaacaggagctctcattcattgctgctgggaatgcaaagtggtacagccactttggaaaatagttttgagagtttcttaccatgctaaacatagttttaccacatgatcaagtaactgcagtcctagatatttacccagctgatttgaaaacttacgtgcacacaaaaacctccacgagaaggtttatagtacctttacttgcaatcatcaaaactggaagcaacaaagatgttctccagtaggtgaatgggttaataaacttgggttttttaaatacacaattaagctataattaatagcatgccccatgcataatcacagagtaaaacaagaaaggcccagcccattaggtcaaacatgctgagtgttgtggaacagcaaaaatctatttctaaagacttgaacagtagctggaaacataaaagttcagattattggctcagttggacttgattatatgagactagtgtgtatataaagaccctaaagttgggagggtatgtttaagagatacatgaaaccagcaggacagggtggtgctgacatcactttactacaaataaagttgttataaatccatatagtgggatactattcggcaataaaaagaaatgagctatcaggcgacaacatggatgtatcttagatacatattgctaagtgaaagaagccagtctgaaaaaacatattgaatgattccatttatatgacacttgaaaaggcaaaactatagaaaaagagcagtagttgccaggggcgtgggcagaggagagggttgaatagatgaagcacaggggatgtttttaaggccgtgaaaatattctgtacaatactgtaatggtggtagggtataataaaaatatacatattggatctttgtccttggttcccagcatggagctgggaggatacaaagaataataccaacagctctgagagtacatagggaatttgctatctagtcaggtacgtgttacagtgtctcttttcttctatgtccagtgagttcctcccttacttgttaaggacctaaactaacaatctagttaattaaccaaccaattccctcactcgtatttgcattagtgtttcaattgctttgcgttaaccttaagtttcaaaatttcttaagccggttttcagtaatctgcccttcatcaaattatagaaagtagcataacaaataggcttgagtttcctcatctcctggccctcctccgtctctggggaaaatattaaagacagaaatggtcccccagtgtagagctggagccaggaagcaggaatacagttgagggctaggataaccaaatgaaaagcagagctgggtgttgggcaaattggttgtattccgcgaatgcagacagctacacctgcaaagacgcaggaatgcagatgatcagataaaccaagttcaaagaaatgaggccacacttggctcgaaagagcggagaggttggtgggtcagtgagataattgtgctgcttgttcagaatctgaaccagtcccgtctgttatctggtcaggacaggtggcttgcaggcagagtttgggctcaggcaggtggcaccaagaggaaaatttatggatagacctttaactctggtcactttggagcccagcagctctggaaattggatccagatggatagtattttgatagcttctcctaaccaaggaatttatgctgattttcaggacccaaggggaaggaggaagctcctaaaggcaaggaattcataattgcttcttaccatgtttccaaaattcatctgtgttttcactcaccaccacagtcagggctggcacagggactggggaatgaaaaataaatgagggctcagggcctcactcatcacacgtgtgccttccatgggatgtcctggagcaggacagggaggagtgtggggaatagtctcctaattcaggaaaaagtctaggttgggtctgtaagatcttcctccactgagaaatgtattaatccttgccctgctcatagaagcaatgaaagaagctctaaacaccgggatggatgttcctccctccacatttgggtttttgcgtgagttaaactactggaagggtggagggttctccctctgtacggagctcagtacaggccaggagggcccatctatgtgaacacttctctgaaaatgaagctacttctggtcatagctctgctgttaactgtgtaatatgggtaaccccttaactgcctctgggccatggtgtcttcaccggacatttgcatgagagccagaggatggccaggaccctttcaagctctcatcttcaatgctcctagaatctccgttggaaaccatttggctctgctggaatgttacagaaagaaggcaagggcaattcttcttttctcatgaatgttttgggaattctgttgcttggaagagacttcaaagactgtatcttctgcttctctgtgagattcatctccaatttatgtcacaaggagatgggattttgaaggcatactaggtgatctccatccaggttttcatagcttttgcaagcacttactgagcacctgctatgtgccagaccttgttctcataagtcctgatttcatactaagacatccagacaaagaggtagcataaacaaagggcttgagccagtaaagatgataagcaggatgaagaatactgttgctcagtccccagtcagatagagcatccaacaacagcctgcccagctactctcagaatcctgacactgtggcccagtgcccatctcctttcctaattccaagcaagaaatcatccccaatactgacattcaccaacagcccttgcactgcttggggacctacaaaaggagattcttttcatttctcttccaaatttcatggcaagggcatttggaggagttagtggagaaggatggcaggggctttgagttgtcatcttttcttaggagctaagaattttaaattgtacttaattgctggtcacagtcaatggattctaagaatctgatgtgcttaccctgcacactcccaccagtccctcagcctgggccagccataaaaacacattactggtgtctgccatttggatggctggaggagatggcgtagtgagttttatttttacctgaatagtggggagccagctgatgtggtgcacctcgtgttaaccaataagcacctgatgggatttgcctcacgtcaagaggaagaaggggctcttggctctactgggccacatcccagttcagtgtttgtggaaggcattcaccttggagcttgttgcctgccaggccccactcttagggcctcttcgatgctggggagaatgatgtcagcaccacccattcctgctggtttcatttatctcttaaacataccatcctggcattggagcctttacatgctagtctcatataatcaagcccaacagaggcaatgatctgaccttctatgtttccagctactatttatgtctttagaaatggttttctacattccatagcactcagcatgtttgacctaatgggctgggtctttcttgctttcctctgtgattatgcaccaggcatgtaattaattatggctcaattctatattttaaaagcccacaactttggactgagattacaatgaacaacatttagcattggcttacctctgctttcacgtggagctgagagatggagttaggtagtagggagtgaagtttgttatgataggattgaaacctgcaggcagcagtattagataatttttctctagctggggatctgggggtggtggagaccaagaggtcaatcaccagcatgtaatgtggggccatcccaatgcctactgtcgttgccactcccaagaacaaagagcctgcttcctggatgactgggagccaaccatggtggaagtagggagtaaaaaggaactaacagggtcagctcatgaaaggttttgtaagccaagcataggaatttgaactttattctgtaggtaaagggaagtcatttgaagcagggaaatgatcacttcagcagctgtatgggtaatggattaatgaggagagactggaagcttggaggccacttaggaggccacagcagtaatccaagcagagaagaggaagctgtttaataggcagaattgaatgaacgtgttgactgaaagatagaaggagagggaggtgttgatgactccatgcttttggtttgagaagctggatggatgatgatgttaacaccaagaataagaaatccagtaggagggagaagtttgagaaaggaagaggatgccaggtccagtttgggacatactgaatttcagatggtttggggacattcaggtgtttcattgtttggccatgtaggtctagagctctgaagagagacttcattagagattacaagcaggggtgtcatcagcatcaaggtgctagtaactatcacgggcaaagatgaaatcagctaggaaagaaagcacagaaccatcaggagggaaacactcagggccaggccgaggcagagaagcttctggagggcagagactgagaagatgctttcatagcctggagtgaagtctgtcccatctgtcctatctcagttcaggctagaattctctcctaccctggggcctctctagtcccccagggccactgggctggctctgcagttggccacactgaggctgttctttgaccagtgtttctcaaatttgcacctgcagatgttgtattgttttgttttgtttgagttggggggagatgctgcgagtcctttaaagaacctcccatagcagtctgtgaatacgtattctgaggggtctttgagttctcaagttcaggaaactcagacgtggtcctggactctccttgcctggacttgaggtaactgccttggcctccctaagccaaagatgcatctgggccccatatgcgacccagggcttcccatggcaacatgtggtgttgtttttactactgcaactttttatttttctttagagctgattttttttttttccttttgagacagagtctccctctgccatctggactggtatacagtggctcaaccacaggtcaccgcagcctcgatctcccaggctcaagcggtcgtcctgcctaaacctcccgagtagctgggactacaggcatgcaccaccacaccacgctaatttttaaaaaattttttgtagagacagggtcttgctgtgttgccagggctgatcttgaactcctgggctcaagtgatcctcccgccttggcctctcaaagattttttttttttaacagctgtattgagatacagttcacatatggcccacttaaagaatacaattcagtgatttttaatatattcgcagatttgcacaaccaccaccacagtccatttagaaccttttaaaatcaccccaaagaaaccctgtacattttagctatccccttagcctcagcctctccctccccatcacctgggttttaggcgactactaatttactttctggctaatggattaatgaggagaggctatagattcccctattctggacatttcgtataagtggaaccatagactgtaactttttaggattgcacgttcccatctgataaccgaatctccattctggagaaaggatgttggcatagtctgggtgctttgctatctattatctcctctaattctcaccacctctttggaaagccagccttatcaaccccattttagttgagagtgctgaggttcggaggtgaaatgacttgtcagaggccccagggacagtcagtggaagcacgctgaacagggaggggcacccagctctgtctggctgcattcgctgagctgtcgctgtgctaggtgctgaagcagggctgggatgggggtgtgaagacagaaaatccaccagcagctcgcacgagtgggtcctcccagaatgagtccaggggagccccctggaccaaagcaggacagagctaattccaggaacaactgcacatttgtccactggttggagtgagcctcccccttttactgcatctccacgaggcagaggaagtggcagtggcctgagccctcagatacctggtgccctgggaatgttcccaaccagatgattatggctgttgtcaccaccaagccctgtcttgtcatcagcctcagtgtcaggccctgggacccagagacacaccccgtccccaggctccagcttcatggagcttcagaatcaggccctgttacacccactgcagggaacttatcatctcattataaaggataaggcatattttttcagtatggttatacgcggtaatgaagcatgcaggaaaccacacaagatagatggcagctttcactagtgaagctgaaaacttggttaccttaatagtctatttattacattcactctctgagcttacagcacctgattaatatctcccatcttctcccttgctatacaattaaaactagtaatatgtgattgcacatgctgactccagcacagatgggtgtgtggagttgaaggccgagataagaagtgaaggggtcaggcgtggtggctcacgcctgtaatctcaccactttgggaggccgaggcgggcagatcacgaggtcaggagattgagaccaccctggctaacatggtgaaaccctgtctctactaaaaatacaaaaaattagccaggcatggtggcaggcgcctgtagtcccagctactcagaaggctgaggcaggagaatggcgtgaacctgggagacggagcttacagtgagccgagattgtgccactgcacaccagcctgggcgatagagcaagactctgtctcaaaaaaaaaaaaaaaaaaaaaaaaaaagaagtggagaaggaatgttcttcctgggtcatgatagaggagtcagatcccttgctggtaagggagtgatcttacagaattaattacactcgaggagaaaaggaccctatgtccactgcccagtctcacccattgccgtggcttctggcaggggagtggtgaagcctgcacagagagaggatatcagtggaggtggccatacggcctttaatcagcaaaaggaaagatggctggactttaactcatttgcttggatgagaatgtttgaggttgaattcgattacaatgatgtagctactcaaaagccgctcccaacttcctgctcccctgcccacctgctcctgaagagctgagcatttggccaagttctgaccaatgagatgtaaggagaactctgctgaggggtttctgggagagatgctttgctttttgacaaaatggcaagtcacattatgagaacttgctggtgctgccctctgccccttcttcctgaatgtggatgtgatgactgagtttgggctgccatcttgtgagcatgaggatgaaaacgtaacatgccatggatggtggagaatcaccagggagagcctaggttcatgattacatcacccagctgacagcccaaccctggggtcatctacttctggaccttttgttaagcaaacaatatatagccttgtggttgaagccacagttagaagggcattatgttccttgcagctgagaaacatacctacataatctaaatggctccatttattgagcagcatatgcgtgtcctttgctaagtgctttgtgttcattttgaagcttcaaaacatgttccctttaagggagctactatgacctctgttttataaaggaggacacgagttttaagtgtataaggtcacacacctattccaggaaagagcagagctaagatttgaatccaagtctttctgactagagagttattactattaatcataatattgtgactttgtagacagttcatctcaacactgaactctgggaatgagtgttacttaaagtctggttggcataatagtactcagtataaatcacgaagtttttccacatgacccactaaaataaggtgaaattcagtcttattggtgattgaaaattgcatattttttacctgcctcaacccactccaaatagccggggttgaaattagtttagctaacctaacttgccccagccaattggatggccaaaaagtgaaatgtgtatgaagggaaaaggtcccagagagagaatttgagttaaaagaccaccagtccgagcctgtgtgcagcccatctcatagcttttgagtacaaagcaggaagcctctccttccgtggcatttgaagactcagagcaaggttaagatggctttgaaacctgggtctggttctcccagaaacacttctgttgcttctcctcattaaagaaaacattccaagtgtgcaattgttctctgagatgaatttctcaaaacacatgtgaactacttgagactattctaattcctggaggtgcctagtcagtgctggccatataacagatgctcagtaaagatcggttgctttcatgaccagtgagggcaacagaaaaaacaaaagatctcttaatgaatatgattcatcctcctagcctcagtgaaaaggcaaaaaataggctgctttcttggaaacgtgccagctaatggtacttagcatgcaagggaccgcgtactgatccatacccattagcccaatgctcatcaactcttctactggagatatatatatatatatatacacatagccagcagccaacagagggacttggccacatgctgattctctctcccctcccagtccatcagaccattattcagcaggaggtagtagggtcttcccctccctcttatgccctttagggcaggagctatctagagagggaaaaaaagtcagaataaacatatgcaaggactggggtttaaacatcccatgaagattaacttatctggagtaattgccttaactaggggatttttaatgcttttcaaagttttttagaggaagaaaaatatgcagaatgagtcttaaagcagccaacagaggagatacttagagcaaaaaaaaaaaaaagatatcaaccataagaagcccatagctaggaaattttaaggcactgattctaggggatttaataagaatgtaatttgtataattaaccattcatcaatgtcaatttcattaaatgaatgccagaaatattaccttcagcagcacgacctaacaggattgaatatattatatgaaaaatgaacacttagtggtttcccccactgctctgtctgtcacagcaagatttgcaaggctgagaaataatttaaagggtagtaaatgaaaccggctaaggcaaatgtgtgcattttggtaactaacctccgtcatgatgtatgagagttcatgtcaaaatgttttcctgcagcaatgactaaagggacttgtagctctctcccaggtggcaaaatgtgagaaataatgccaggaacttcccaaaggtcccccttgtcactcgcctggatacagcttactctttccctagataggctgcctagggtctaagaccagaagccatgtgtttttgtgtccagaatttgtagaccttcccttcatacctccaggttagccttacatccaatcacttgcctacctgtccaggaaaagtgatgattgatgtgcaggagacagaaatcattctgagttttatttatgttattgcctacagtcatcaggggagcacgaagcttgaggtaggtgggctgatgaaatatatgtaaataggacttatttccaaggttgctcatgagggaggcagtttatggagggaggcagtttatggggatttatccatttcagtgcatcataggaaaagtggaggacttgggagcgggggctgtagtaacttgtccatgtgtgtgctcctgggaatgtatatacagacacacacacacacacaccagatcaagcacacactggagatcagtgcttgagatttgcaaattgttgtcactggagttggcctggtgcctcgtgtatagtaggtgatcaataaacatttgtttaattgaatttctcttagtgttaactccactcccattctcttctgtttcagggttctatgaggctgaaaatattggatcagtattcctgaggaatctgcgtttcagaatcccaggtccggaaggacaagaagtactttgcaaacaaatcaaatgtacgtttaggaagatgaaatcatgcaacagaaagatttttcagaatttttcagcaacagattttacacacaattcagaaggaagaaagaacagatgagtttgggaatcaggagaccagatgtcaagactggactacatctttatattcatttccagatttaaagttctatgttgtattttatttgatgcaaagcaataaaatattcctccctcctgtgaccaccgaaaaggtcatatttaggacctgggtgaaggaagagtgggcatcacagagctgctgtggagtgtgtgcacagattctgtgtactaggtctgtgggctctgcaagactcaaaatcaattgctgaaacacttcttaaatgtgttccctcctatgcattctgctatgcatagtcgccctctcttccttctaggttagagtgggtgacactgagcatgtaacttaacctctctgaagcacagtttcctcatctgcaaaatgaggatgataatatcctcctcccagtgttgctgggaggatgaagtgagatgaatctggtgatactgagtaggtgtgcaatcaatatttgttttttcctgccactcctttaccaggctttttttcacctcaaatgagtgatgacctctgagtgcggagcttttttgtcaattttttaaagacagtggtccccagcatttttggcaccagggacaggtttcatggatggcaatttttccatggacctgggtagggggtggtttctggatgaaactgttccatcatagatcttcaggcactagttagattctcataagagacacagcacacagcctagatccatcacatgcgcagttcacaacagggctggtgctcctaggagaatctaacgcctctgctgatctgacaggaggcagagttcgggcggcaatgttcactcacctgccgctcacctcctgctgtgtagtctggttcctaacaggctgaggaccggtaccccggggctggggatccctgttctatgaggatagaaaatctggtaaagtaattcaccctaagatgccattaaattactatgacctcctgggctcaagcaatcctcgcacctcagcctcccaagtagctaggacttcaggcatgcactactatgcctgggtaacttttttgatttttattagagatgaggtctcaccatgttgcctaggctggttttgaccccctgaactccagtgatcttaccgcctcagccttccaaagtgttgcaattacaagcgtgagccacagcaccgggttactttgttactctttaggggtattggaaatattaagaaaatacagcagggagagattgatttttaggatttaagaagaacaagaatagttttgggagttctgggagctacttccaagggcatgaaccaaatctggaaagtagagttggggttgtgaaatattagaacgtgtggatagtctgatggtttgcaagtaagtgggatcgaccgtggggtctctggacagctccccagagggccgtggtccacaaagggaaacactgtcccatccaactctgagaaatgggtctgggcatccactgctttcaccgagggtctctgcatgactttaggaaagtcactagacttctttaaccatttctttcttatctgcaaaatgggaagagtaagggcacccatcttggaggagatttggcacgtgatgctcagcacattgcctgacaatactaagtgttcaaccaatgctcatgattggccagggcattgacggcagaatcgtaaggatcacagagacctcaggaacatggctctgaaggatagaagctgaaaatcagtgtgctgatatcaccccttttgtctatgaggagtgaatgtctccaattaggctgcattcagcaggcctggcagcctcctctctcttgggatgcaaactgcttatgtggtagaaacaggaagccgtcttgaaaccctcgccaggccccagacgcgcgtgggtccacctaccgtccatctaccggggtcactgagtcactcctgcccaggtcccccttcagggactgtcgtgggctgtggcctcagaggtcccttacagggtggtgggacccagggcccagggtttggctccgggtttttgggcagctccgccttcataccgaaggcagcttagcatggcactgtctgatctgctgacagccgcgaccctgccacctgctcagtgggatggcatcttgggggagcaccttgggcagggctgcccagagccctggaactggactctccctgtgcagggctgatgggaaggaggtgtgtgcaatatggtgggaggagccgggctggaggctgcagactctgcctctgtgcccgttctgggaaagcccctgggcttgctggacccatttctgcccttctgaaagcgggagttagactagattggggctttcaacattgctgatattttgaacagcagaatccttatcacaaagccaatggaaacaaagaagtgatacattaaaaacacatcgaagcaaaacctcctggttgaactggcttccctgcccctccaaagtggttccaaggtgcctccacaaagcctcagggctctgagggtgttagggaaaccacaggtgtccacaatgcctgccatgctatgatttcatctggccgatgtgtcacttcagtattctgatgaatttaccctaccaggccagtcagaatcgactcactgatgatcaaaaaagagaggacacttagaattaaattcatttctttgggccagtctcctttgtctgcacttgctgagaaggcatttatgatgccagtgtgacttatagttatcctggtaggtactgaagcttgtaaaggccacctaatcactttgctttggtattcattagtcatttaacacctctaaagaaaggaaaggtgcggcaggttgcgtgtgcgggaggggagaggtagtgttggcttggaccacagcgggagggacctgggaagagggagaagttgatggtctggtcactaatggtcctcagcaggacaggcttctttgtccttgtctcccccctcccttttgtcctcttctctcttcctctctccctcatttctggcttccctctttttctccttcctcttctcctcctctaatatggaaggaacgttagacacacattcctgtagatgctggagtggaaaggcaggttggaggaaatacaaagatgaaggacatagtcaatctcttcaaggaggtcatggccaagtgtgcaaggggacctcgaagaagcccagtgtgacaaggattgagaggtgtgctcaagatgtgctgagagcagaggatagccccagctctgctctggggagtcaggggcagggcggcagatgcttggggtcacatgaacacacaattgagcaacaaaacatagtcacacagggcctgcctcacacccagcactgggtgggttttgtgcaggagaacttcttgcaggagacttggagacagaaattctttgggaaggagatggggtagctgccttaccagagagagcgggatttctcagacactgctaacttcccacctccacacaagctgatgagactggctcagaaaaggggtctgcccccagtgcataataatagcagtgataattaataatctatagttaatgagattaaattaattattattttaattatgacatgttttcctcctctctttcccctgccagggcaggcttggcacttcccaggattacagtcataatggtaacagataaaccttaattaaaacattccaaaataccatggctgagttaaagtgctgtgacacgtcgtttccatctcattttgagatcttgcctatgacggcaaatgtctccccaccgtcggcagcatcttggccattcagagctgttgccctcacagcattcagtgatgtttgccagagtggctccacgccccttgggggcagatggccgacccactggatcggggccactggagactttttccctcatgctgggctcttcacgtggcatcctgtgcctgctcaatgctgaatctgcttcccatgtgcacagcttactcctttgctccacccggctctgcctctgttcccttcacctgcttcttctcaggccaaggtagacctgaggaaaggattgaaaggattgtctactctggctctgtgggcactgttcctgaggtgtgagcaaaccctgcctcagatggcccccgagtccatcagcagctccttccctgtggtccgagttactggcagggtctctgcgttctgcctttgtgttgagcttctcctccacagcccacccacctgcaggggctttctcacgtgtggcgcgggtgtggaggcaggtctccatggattgtacggctttcccaaggcctgctccagactggtggcctttttatggaggttagcattcttttgttagtccactcacatattttcactcattactaaacatttatggaccattctaggaactgtgcttggtgatgagctgcagagacagaagacaccatcctatttttataagccttgtgggtctgtggaagagaatggaagatacacaaaggaagggagtcccaagctgaatgttctgatagggtcagtgctggccactgagcggggagggtggggagggactgtgcgttcctgcgcatgttaccctacactgaattttatttttttattattttattttaattttgagacagagtctcactgtgtggcacaggctggagtgcagtggcgtgatcttggctcactgcaacctcggcctctccagttcaagcagttctcctgcctcagcctcccaagtagctgggattataagtgtctgctcccacccctggctaatttctgtatttttagtagagatggggcttcgcatgttggccaggctggtctcgaactcctgacctcaagtgattcacccaccttggcctcccaaagtgccaggattacaggtgtgagccaccatgcctggatcctacactgaattttgaaacataagaaggagttatccagatgataagaggggaaggaaggtcacattgagaagagtcaaattcagaaggcctgacagagatgacatccctggaactgcagtagaggagtatggctagaaggcaggacaatgaggatgacaggccagaggtgaggttgcaagtgtggttggggccaagaccacaacacgtgttcaaggtatgtctaagaaggctcaagttcatgaatgggtgcatcaaagaaccacaccccagaaataagctaagtaacacctgcaacactgtcatcaaacgtgctgagccctgccttgcgccaggcagtgagctagtccttattttcacacctggctttcttgcctaagcaaattcagagtcaccctaacttgggtcatttgcatcacaaaattgccttcaaattagcacagagagggaaaaatcaacgcatacctcccaacataacatccccaaatttacctagcccagagttttaaaaaatttatatttttaaccttgatacccaagaaagcaggaaatctcacccagctggaagctctcctgtaaagaattcacaaaaatccacaccaaaacctctagatattcccatggagctgctagttctggaaacactatgggggaaattgcagggttttctattagtttgaaggaggtctacttcctaagacattcttctgctaccatctcttgcatgctcagttcattgattgatagagtaaatcattgatatttttccccattgcttcattcaacaaatttacattgcactctcctacatgccaggcattgttttggatgctggggatacaaagataagtgctctgaggcccctattctcagagtgctcagtccagtgagaaactagaaaagtctgcaggtaatgacaggcaaagagagatgcggtgaaatggccatgggagcacagccttgaagagacgcctgtgcaaggcacaggctccactgccagcgagggagaaagccctcctaggcccgaagcagcaaaagaaagcatctagaaaaaggaaataaagggctgtaggtgtatcaaaggtattccagtgccagttaaatttgagagagaaatcattttatttacgaaaatgtcaaggggaagaagatgcataacttctttaggaacgactcctgcctctgctagtatgtcaattccgagaggcctaaaataatttgggcttgaagatggatggaggtggagagcttggccttattgccaacactgtaaattagcagtaccaagagcagcctgtcccacttctggtctctggctacctcttcacccagctctggccacagtcaggtgatctctgatgagtgcattcaatcaccttccttttccatttggaacatgattgtgtgcatgctgtacataagcgatattgattgcaaataagttgttgactggaagacatgcctctgtggacatgtttgggtgggggatagaggggaaataaaattaaaaagagagtaagaaaacacctgtggcccccagttggaaacttctcaaatatttgaagctaacaatgttttggttgcctatttcttttttcttttttttctaggagctaaacgtcaatattgcatttattgctgaacaaactaaaatcataacaaatataataaaaggagagagttagcctcagctttctgcagagaatgattggcacttttgagccctggattggttgggcctttatcttagctgcgtcagctcataattaaacaataaaaggaggaattgttacttgcttggaatatatacagtcagttttctgtaaggtgggggcagtgtgtattttataagccctgttgctgtcccagttttctgtaagaagggaaatgtgggtattttataaactctcttcttgtctctgtcagttctaaaagactgagagatgacatgatagctgtcacaagaaatttctgcttaataacaatgaacactcagagctctttaggccctgaagaggaatgggaagatgatgagggaggaggaaataaaagcaagaaaatggtaggacaggaagattttttttttccgctctcaatcttgtctttgtttggctgaccatagagcagctatgtagaactatgtgtgtgtgtgtaagggggagagaagagagagagagagagagagagagagagagagagagagagtattgtaataacgtattgagcatgagctgcctgatctttgccaggtgataaactggcccactgtgatcttgcaggaaacatcaacagtctgagaattgttgtttcaggaactagaaagaatcctggaaatagttaagaaagacgattttccaatggccaataccttctcccagtggcttgtgagattaagatttggtattggaatttgtcccatctcgacttggaagaatgagacaccttggaagatgaggctgaccaggccatggagctgcccagaccccctgggagcccagagtccccatccttgcatctcatgatctatcatttaacagccctgtccaaagtgcttgctggagatcacagggctaggccacttctgctccttgcaagctccaaagaggaggtctcctatgcacccgaggaggatgagtcttcagagtttccagctgccttcttgtcacctggctctaccttaccttgacactcccaagtgtagacatgcctgattattctatccaaacccagccaggagatgggaagagacatcttgttagccagttgctctggtagcctgcattgcaagggcctggcttttacgcagtttcgcttcaagtcagtgcaactagctacctgtcttcctgtcacttttctttggccacctgggtctcagcagaggccctcccaagactgacaggttagcacggaaggtataatctgctagtcagatttcacatggctgcacagagaatcggtgcccttggcaggtaagtgaataaatatgggaagacatttgctattaactgcaaatggcaagcagcatcttagaaagctagttagtgaaacagggatgggagtgtgagagttgatgcttcttttagaccctatttgtctcccggcctcacactgccttcctcttgctcagactttccctcttgcagtatctcctaagtcactggaggaggcccgagaagaaagccacgacccccatttgtgtgactgagatgttttcccagcgtcagtctctcaacctccccagtttcagctgcactacttcagaatgggacctctcctggctttatctgtagtgcggactatgtgtaagatcactggcagtgagtgtttatgcgccttaattcatgtatgtgctgatagcttataccccatctctgtattctccatcagaaacccacaccccagcagggaaattctttgaagcctaaatacttaaccatttctttggctccagggaatgtttgaaagaaattagttctaagcaggggttttttttttttttcccattagtttcagagcagttttagggcaagaaaaataatcccccttccctcagtggatggataatgatgggaagtcacctcccttcccctgggattaacctagaagggctctggttgggaaaatgttacctggttctttggggaaggatgacggttttgtgccttatgttttggggttttctgggtgtccctaggtaaccatctgtgagagcatcttgggcttggagtttttgtcactgtgaacaccttctgtggactcaggtgaattctccagttggcaaaagagggaatgcaggcttcgctgactaatccctgaaccagctaaggacaaggccttagaaagtttcgtctacaataaagaagcttttatctgatgtcgaggaatctttaccagtagctgctgtcgtgaatacaagtgcacctttatggcccacagtaagcactgggggattttctgtgaaatccttgtcatttcttttacccattttcctaggaagtgagttgtgctcttgtatatgctcttcacactgtgcgaagtcagttacgtgtgtggcaaagaacttgccttggtttctaacttgttttacactttctttgcagtgtcttgatgaacagaagttcttatttggattaaagaaacacatatggtcaataaacatatgatgggatgttcaacctcattaatgatcagggaaatgcatatcaagggcacaagagataccaatctcacccactcggctgttaagagtatggaagtatgacaatatcgggtgttggagggagtgtggatctgcagaaggttttgtgcagtgctgatgggaaggagaaattgtacagccactttgtcatgatctcgtaaagttgatcattcaaatgctccatcatccatcaatcccactcttaggaagtcagacaagggcaactctctctcacgtataccagcagacatgtatgagaacggtcatttcagcactatttatataaagcaaaacttgggggcaatacaaatgttctctgacaggagactggatcaatatattgtggtgtgcctatttaatggaataataaacctcagtcaaaatgaatgaacaatagtcccatgcaacaatatgaattagttttagcagcagaattcaagtgcaaaaagtctcagaagaatgcatattgcatgataccctttgtagacggttaaaataaatccaaactgaaaattcttctttttttaaaaaaaatatatgtagcagtagtaaaactttgtttgaaaaaagggaaagcaagtcaatgatgaacataagattcgagaaagtgcttagttactttgggtagaggaagagaaaggatgcattgaagattgatgttgctactctagttttcttgtttgtttggtaatttaaagaatgtttattatagtactgaagagaaatacataaatacagcaataaaaaatcaaataaccagatttaaaaaaaatgggaaaaggacttgaatagacatttctccaaagatgatttacaaatggccaagaagcatatggaaagatgttaaacatcactaatcatcagagatttgcaaatcgaaatgatagtgaggtatcacctcacacccattacgatagccactatagagaaaagccagaatatagcaaatgtcggtaagagcgtggagaaattgggacccttgtgcactgttggtggtgttgtaaaatggtgcaactgctatggataacacaatgaaggttccttaaaaaattaaaaataggaccaccatctgatgcagcagttccacttctgagtagacatccagaaacattaaaagcagggtgtcgattcgcacacccacgttcacagccacactattcacaataaatagctaagaggtggaaataggctgggcacggtggttcaggcctgtaatcctagcactttcggaagccaaggcaggaagatcacttgaggtcaggagttcgagaccagtctggccaacatggagaaaccctgcgtctattaaaaatacaaaaattagctgggtgtggtggcacacacctgtagtctcagctcctcaggaggctgaggcaggaggatcacttgaacccatgaggcggaggttgcagtgagctaagactgcaccaatgcactccagcctgggtgacagaccaagactctgtctcaaaaaaaaaaaaaaaaaaaaaaaaaaaaggaggtggaaacaacccaagtattcatcaatgatgaatggataaacaaaatatagcatatacatacaatggaatattcttcagctttaaaaaggaaggaaaaccttccatatgctacaacatagatgaaccttgaagacattacgctaagtgaaacaagccagtcacaaaaggacaaatattgtatgacttcacatctatgagggtctaacatggtcagattcatagaaaaaacagaaagtaggatgttgattactagggacaggtgacccctccttggatctacccgctttgcaatgtgactctgcagctcttcccaccaacaggtggagactgctttcccatcccttggatctgagctggcctggtgacttgctttggcccatagcctgtggtggaagcgaggctgtgctggtgctgagccaagacctcaagaagcttgcatgctcctgctcacgcccttggaaaacagacatgtgaggccatcctagaccagccaccctctaggtgaccctccaggtgactgcagatagatgagtgagtgcagttaaattcagctgtgctgggccaggcactgtggctcacgcctgtaatcccagtactttgggaggcgaaggcaggcagactgcctgagatcaggagtttgagaccagcctgggcaacacagcgaaaccctgtctccagtaaaatacaaaaaaaattagccgggcgtggtggcgcgcacctgtaatcccagctactcaggaggctgaggcaggagaattgtttgaacctgggaggtagatgttgcagtgagctgagattgcgccattgtactccagcctgggtgacagagtgagactctgtctcaaacacaaacaaacaaacaaacaaaaaaacaacaaaaaaactggctatcaggagatgaagaatgcatctgaaagtcaacaaggagagaaagagactctgccggcatgccgtaaaagcgtgcaagtcatggcaggggaacacataagtgtgttacatctgtatgcacatgcatgtgagtgcctgtgaccacacacacacacacacacacacacccatagtcagaggaagcctcaaatcaggctgagtttccgaagggaaaatctcatttgtccaccagtgatagcgtatgtagccttctacattaatgtaaattgaggcaggattaccttctagtgataaagtcgcatctggtagcagagaaaaagtgagtggaaacggacacatttccaatcaggctctggcctgggctgcagccccactccgctgaacacctagatacacctttttaaaacccaggatccttcgggctcagcctcctagtccttgccccttccccagatcccacccctgtctgcccaccttgtcttctcgggccctcaaaacttaagccagaagtctgggcaggccagtagaggaaggagctggggcccaggcagccacaggttgaagaggcggagggaagcggcacagctcacagtcacactaggacaacttggaagttgaattggcaagttgcagcaggagatgggagcatgggctccatccctaagggagccacattcgttttttttcctttcaaagtcgtcaggcagtaaaagaaaattgcagggatggggaaataatgaaaaaggctctttgtttttcccccagtccgaactcctagctcatcaaaccttggaaatgctcactgcaaatggttgttcttgttttattgcttatttatgggaatctatttaaagtgaattgcacttttccattgtatcctagtgagcgtgcaccggagttgtgtctcccctggctgtggggctgtctggactggggattctgtctgattgtgtcagcatcacgctccgtgacatttaaaagtggggaaggaaaatactgcagaggaagcagggcgagcgtggagaatgattgctcaggcctccatcagctccaggcgggtgtggggaatgctgttctagggcaggtttgggggtgctgactaggccttcacacaaagaggaatctgctcttgtggatgaatgaatggcggtgacaaatcaaactttaatctggctctgctgtaagcattgtgaccttagggcaggtactgacttctatgagccaccttttttaaaaaaaattctctacagagaggtgaatactgggctgttgttaataatgatgatggaattcattatatatatgagagtgcttactcagtatcaggtagatgctcactaaatgtaaaactcccttataagggtggctggaatggggactggaagagacaggtaagtccccaacctatcttcattttcttaacctatgccttttgactcaaaaagaatgaaggctccctcactcctttgctttgattgggagatgagatgcgagtctcaatgcctagaatgctctatagcaggggtcagcaaactggctgaatcgggctgctgttctggtagctaaagcattatgggaacccatccctcacccccttctgtctgcgagccatctatgacagctttcctgctacagcggcagagcaggatagctatgaaagagaccgtggggcccacaaagccgaaagtatttactttttggccctttacagaaaaagtttgccaatccctgctctaattcattggtattttggggttctcttatctgtgtgatcagaaggtctgagcctcagagaaaggaagcagcaacttgtccaagatcacaaagttagtgtttgagttagaactgcaatcaggtttcccaattcctggcccagtgcttttccattgtttaactgtaccatttcacagagatcccaaagccattgggattagctttaccaaaaaaaaaaaaaaaaaaaaaaaaagagtctctaagtcacgtggcatctgagctccatgtgattggtaaagttggcattagtccctgccacatttcccaagtccccaccttctctgctcaccacaccgctgtctctccaggctcagcaaatacttctagagacaccggtgtgtccttgtcctgaaacctttgtgagtcagctgcattgactcctgctccaggatgacgagggccaattccttgatgaagggccatctgcctgtgtctggctgcctgtctgtgagctttcgtgtcttgggggctctgctgcattgcaagaaggagctgggacagagctctgagagaggggaaggaggcagggagagggagtttgattcctgaagaatcttccttttcccatgaagacaagcaagctgatggccagcgtagagccacagcctggaaaactttatttttaaatttatttttggtggggaaagagttgggttagctctaatttacggcaacctccccagttccctgacactgctgcctcctcatatgctttgctaagaaaacctggatgagtcgggcgaggtggcttatgcctgtaatcccagcactttgggaggctgaggcgggtggattacctgaggtcaggagttcaagaccagcctgaccaacatggtgaaaccccatctctactaaaaatacaaaaaaaattagcctgacatggtgacacgtgcctgtagtcccagctacttgggaggctgaggtatgagaattgcttgaacctgagtggcagaggttgcagtgagccaacatcccgccactccactccagcctgggccactgagcgagactctatctcaattaaaaaaaaaaaaaaaagcctggatggcctagtgcttccttattgcttaattaacccttctccctttctttgacccttctcctccttggttgccttgtgtggttgatggtgacatcatccatccaatttcttatcctgtaacttccaagttacccttaactcctgcctttgcccaatccccagccttctatgagataccacatgcagcctgcaaactcccacagctgtacgcaggcatgtggcctcttgcctcgacatctggccccaccgtccaacccacctttcagcctccaggcaggtcctcacctctgccatcctccacgtgatccccaaacgttgctgatcaacacaccacagctggaatccacagaggcgccacagtaccgaaagggtggctcaaaccacatcgcatggctcataaggcccttggcgagttgacatcaggctccctctctcccaaagccacaccgtcttcctgcaggcaccgccagtggacacaccgaacacccctcttgtccaaacacactgcagctccctacatacaaagggcaggagctagactgtggaatgaggttgactagcgcttacatccagacactactgtaccacttgctttccgggcagattatcttccctttctgagtctcagtttcttcatctgtattaatggagatgacctaagagctgccctgaggattaagtggtataatgcacttaaacatgacaaaaaaaatgcactaaataagtgtcatctccttcctttccagcctctgcctgcacaaacccactgttctttcgctcagggtgctctgccctgcgactcagcctccttcgggctgcggcttagcatgttcccctcagcctccttgcaaatgaaggcttagtcacttcctccgctggtcccccagacctgtgttcacctggctcacagccctccttaattacaattgtaattgtttatgtgcttgtttatgcgggagatgacaggactacaagaaggcgggacttcctctattgccctaggccctggggtgaactgcagccagcactggccttgccggctcactgcacagggtgggcacttagtccctgacttggacaagccactcaacccctaggaacctgttttcttatctagaacatgagggtaatagttcccagttgccaaagcttttcccacagaccctgactcagaggagatattcaatgaatgctggttctactctacctttccagggctaagtcctacgactgtgacacaactgatgctcagtggctctttgtttaatgaatgaatacatgaatagtgattagagatgaggccccaggacctatagctttagatccaaaagaggtcagaagatttagaccaaccctaataacctgaactcatgtaaaagtggctctttcctcccagtccaaaccacaaatcctaaatgctcattcagcctcacttgccggggactcagcttctcccggggcctccgggtgggtcccatgattgctctgatcacctccctattattggatattaatcaagtcctactcagaccacaaacaagcagccctgctcttgacagtcatctgaggatctttgttggtgatgaggagagtgggaggaagggagagtgaaggaagaagagagggaaagtgatgagaagagagagccagggaggctcagagactgagcaagtgccaagaagggaagatgacaacgctggtgaagtctgaacaaatgcaaagtcaagcacaataataatttgggcaaaatggcaaatggcacagctgaggaggaaatagcattgtgaatgtaaaaactcctaaatggagcgcagatgggagggaaaagtgtaatcttctggaaaagcctctaattgtctgcccacactaataatttcagcaaacgctccctctctccctcctgcgtataattacaccattccatctgtctatcagcaggttttttactgtgccttactgctaccacgttctcatgctcacggagagatgaggggtttttgaagatttaagaatccttctgacacatatcctgaagaaaaaacactcaggcagacaaatccctctcccaggcctgctaagactctattttaaaaagttgtataatctctccaaacgctattatgaagtccaaaggaggcagggccacatggaccctccaccttgggtgttctcatctgccggcttgtcttagtaggtcagctctggagagacgacaggtcaggggctgcagggagaaaggggctggcagagacaccggcccgtgcatcccgcaggtggcaagtcataagagcatctgctcagggctatccctttagagtgtcttaggtgtcaaggccagggttctgctgcgtgaggaggaagaggaatgcaaatgaaagagaagaagccagccgggagtggtgggggagtgtctgtggccatgtattagctcagctcagctggcctgaggagcgctgcccagcgcccaaatccagggctctgagtgactccaactgccattggcttctctccctgctctggcagtgagttccagagaagacaggtggcctcgtgcacagagcccagtaggaaaggctccaggtttcccacccaagtcactgcccttcgtgcaggaggtacagagcttcccatttgcttgctccacgggcaggagctgcgatcttaaggggctgggagctgcctgcaggttcttcatcaggaagttttcttttcatgtgaaaaatcacatcccagctcttctccctttcctttccaataagtgggtcctaagtagttactggaaggggtgccaggagagaggcaggacaggtcaaaaaggggaatgaaggccaatgcccccaagaggatcttgaaggctagaggtgtggtggtggcagtgggtgccacgaggtgtgacctattcaccagatgtggattgggccaaggaaatgtcacacagaggcgattttgacagagccagagcccctccatccagcttgtcctcacatagcctgatatcataaccgcatcttccccagaattgctgagtggatggggagaagagttgactcacatcacaattcattcgacaaatattgatagtgttcccacaaggtgcagtaaaggctgaatacaacacgtttccaattctctatggcagcaacatctaatagaaatataatgcgagctgcagctgcaattttaaattttctagtagccacactcagcgagtaaaaagaaatgtgaaatttcttcgaatagtatgttttattttagtaatatttcaaatattattaattcaatagattataattataaaattatttgttagctattttacctttttttaggtaatgtcttcaaagtctggtatatatttatatttccagcatacttcagtttgagctggccatgcttcaaatgctcactgccacatgtggctagtgatgagtgtatcagatggtatagagccagagcttattaaggagaaaaaattgtatgtataattataattctagtatgtgcattattattattatagtttaggcccgcgaagtaattcgctaaacactttcacatacattatctctgatcttagcaattttgtgagatgattagttattgatattttttatcagataaataaaaataaggccggacatggaggctcatgtgtgtaatcccaacactttgggaggctgaggtgggaggatcagttgagttctggggttcgagaccagcccgagcaacaaagtgagaccccatctttacaaaaaataaaaaaattcattgagcgtggtggctcatgcctgtggtcccagctacatgggaggttgaggcaggaggatggcttgattccaggaggttgaggctgcagtgaattatgcttgtgccactgcagctcagcctaggagacagagtaagactttgtcacaaaaaaaaaaaaaagagagagagagatattcagagaaccgaagtgacttgtgacttcagagcagtaacttgacatccttatttcctactttctgaaacaagtatatgtacacacacatttttctgtgtgactcagtatggcacattggaagaggcagcgtaccaccttattttcctcttcattacagctgctttcttcttaagaacactctgaagaacaggaccggaaaacgatgtgaggtccccacactgtgttccacatacaattattagattggtgcaaaagcaattgaggtttttgcaattacttttaatggcaaaactgcaattacttttgcactaacctaatatctccctttactaatctctgctgctgtccccagatcagctgaggccccacctttggccgatcctctgcctcctagcctttctggcggaccccattcttagaaggctggggagtgggcctcaggaagcagccggggctctgaggagcccaggcattgtcttttctgtgagactcatcccgctattcagcaggtgaaacctctccgcctgtcattctctccccaccccataatgtgcaacaggcctgactttgtgatgggcaaatatctctctgagatcttctttacaggcattcaccccccacaccctcctcagcagtcttgggctaatgagctcagttcctttaaacccagctcctgcctcagcccttctcagaaacttatatccggccatgtagacaaagctagaattaaggcttccagatttatttcatttaacaagaacccacaaagccagcccagtagcccattcatcccaaaatagcttctgaaagcctgaacatacgtcagtgtctctttgcagaaaccacactgcattgtcatgaaagggccatttgaacaaggtagctacaatgaaattatctcaatgcatttcaatcactttgcaacatcaaggttcatttctcagtaacagtctctttgacaataaatgaattgcgtgattggtgtgtgtttgcgtgtgtgcatgtgtgtgacaccccttcatgatgaattcctgggtatgccaatgttacaagtgattggtctttgcatccatctcttagcataaatccccagcatcaacgtgacatgttgagcagcaccgagccccctggattctctcagtcttggtgagagagggagtggggactgtgttcacgctgttacaaaaggacatctaagagggacagcagggaggaagctgggcagaaatgctccgaatcaatagctctttcttcttggtggcttggagcttgcaatctctcagcctgtgtcgagtcatcatgaaactgaagaatccttggaaagtcactgggttgggcacttttaaaagtagagtcttttctgttctgcttagaaactctcatggcatgctacagagaaaagaggagcagaggcccacagagctcccttcaccagagaagggagcgaggaggtcagagggtggaggaggtgggctgggatctcccagggcagcacctgggcggagttctggagccactcccagcctggggagaagccctgcccctactgtttgctaaaagtttggacaaatccttctctgccctgtacctcaggttttccatctgtaaagtgggaagacaaccatcccacagaggtgccatgaaagatttttagggagtacctaaaaggttctttaggtgctagtcaagtcccggggtctcgatgtgtcattaacttgctgtgtggtcttgagcaagttacttaagatttgttaggtctccttcctttctttataacagggtaataacctacctccctatttaacttatgagtaaagcagaatggctgtgagagtgggcctggagccaaagatacctgactgtaaatctgagctctgctccatcatcttgggtagtctgctaaggtttctgtctcctgtccaaaccttcatctgtaaacgggagcaaatcatctctaatttgtagacctgttgtgagaatttaatgataatgcatgtaaaatgcctagcaggggcctgtcacatagaatgtaccctattgatggtagctgcaggtatattacaaggttgtactgaaaaacaaatgaaagaaagcaatctttccttgaaaaatgcacagagctccacaaatctatgacatcatgatgattatgatgattgttgcaaatgtcacatcttcatgtggagtcgaggtgggcattagccacactgttcccattactcaaaccccagatgctccaatgacagagcctctgctgagaggctgacgtcagggagaggtggaggagggcagatctcccaacccttggcttccaccagcttcctctcaccgtggagccctaaggcctcagcagacacgctgacttcttttcagaacaaagcacagcaaaacaaaacacacagcggctgctgaatggaaaacacttgcactctagaaaggctggcaaattccctgcctcgtcccaccctgcacggacagggccctctctgcccagccacctcctggtgcaccccgctgtatctctgaccacactttaaatgtgcaccctaggaggtggatgctctgcagagagtgtgtgtgtctgatctgaggcctgtggtcccctgaagaaagaccaacaggactgggtgccatcctgtgcccaagttgttcccaggaggagaaagcctgtaggaggggagcaagctcccattctgcctccattccttgcaaggtcagccagctacatgctttcttctggctgggcccctgagggcaattgttgctttttcctcttgaggagtctttttattttcagagtggcagggaggatggtttatggtgagtatggacctaaatgagaagggtgagtagtagatggcgtattctctgggctgtgaatcctggtcaggtgggggtggctgggctggggcaggagacactgtaaagagccagtaggcctggattccttccagccgtgctgcttcctgccatttactccatctgacctacttcacaggctgggctgccatgagcggctgctgcaggctgtgcactgcacaaggccaaggcttaccatttgcatggtctgcggaggaatggtgctcctgagagctgttctctgcagcagctttgctcatggggcactggtgagcagcaaacagaatcatcgtcttcatcaccatcagcaggagcagtgactttaccaatgattgatcagctgttatgtgccaggctctgtgctaagtgctttacattttatcctcccctccaccctatatcaggtaagtactgttatatctcatccccattttataagtgagaacactgaggccaaaggaattaagtgatcggtcagaggtcagtcagatcgggagtgatggggctgtaatccaaatgctgggctggctgactcctaagttcacactttgtcttcattcatgatacaaaagagatgtctgttttcctgaggcccacgggcaggggaggcaggactcctaagcctgggccctctgactgcctgggccagtgtttccgtgccagaaaccctgtctcagagggcaggaaagagaatggggagcccttgcagaatgtggttggatccttctctcttggctctgtcatccttgccttgggatgtcctcccaacacaggccattaatctcactcaagggccagtgctggcagcggttatgctggggacatctacataccttgcattcctcccctttcacagaaaggaagaagaaatggaatttctgtcagattgcttgaactcactctctggaatcactgcgcccatcttttcagagatgttgctaccagaatcattccccccttctcttatttatatacactcacacaattagatataactatattcacacatagacacatattacaacttgaacttagcacctgctcttgatatgtatgcccagaaggctgtcacacaatcttgcacacacccacacatttgcacatgcccatccagctgagcaacatgtatttacacagcacacacatttgcatcatatctgttcatgtgcatgcatgtgcacagctgttccccttaactgcagaatgaagtgagcacagcagcacagaacaacagctggtaggaagcatgtttgtcggggtgtggggagtgcaggagagaggaggtggggtggggccgggaagaagtgagtactagcagaacagaggcttgcaaaagactgcagcaaccagccccagctggctgtaggggctcacagtcttgtcacttagaaggtctgtctgagagaccttggtggagtgcagcttcagcatttggggccacagctctgcaggctttttctctaaaaggctgccctatttgtgttgtgtgtccctgtacacgtgcgtatttggctcaggctgactttccatacacagacagggctctatttttggatgtcttggttctcatgagttgtggctaagtgaggaagtctgagtctctcctgatgcccacgcttccaggatggctcctggctgtctgcgttagcaggtcacttttgggctagctacctataccagtccaaaggcttgatacaggaaccacatcagaattggtgacaaaacaagctggggggctcctaaaggaagatactgggattctcaataggccatcacccaagggaagcagtattctcctcctgcgaccatgccatgggatgaaagcctctgccctgtatgtctggccaccttgctaaaaactgtcagccagctctaggcagctccagagctgtatgacaggagtgggaggactcttgggtcagaactgtatttgtgggtggtaaatttatatcttacccactgaatatagctttttatggctcaagacataggtttggttttcttaaaaaaaggttttcttaattcaaaaaatgtacacatttatagtaagaatacaaacagtacaaagatgtcagtccttttctactcgtgccaaaattataaacagtttatttgcatcattctgcaaattttatatatgtctttgtgatatggtttggaggtttgtcctcttcaaatctcatgttgaaatgtgatccccagtattgaaggtggggcctggtgggaggtgattgggtcatgaggtcggattcctcaggaatggtttggcactaacctcttggtgataagtgagttgttgatcagtttgttcacatgagatctggttgtttaaaagtctgagacctctccttccctctctcttgcaccttctctccccatgtgatgtacctgctcctgcttcaccttctgccatgattggaagcttcctgaggcctcaccagaagctgagaagatactggaaccgtgcttcctgtacagcctgcagaactgtgagccaattaaacctcttttctttataaattatcccacctcagatatttctttatagtaatgtaagaatggtctaacactacgtatgtgcaagtgtatatgtatatgtaatgtatacctatgtgtatgtgcataaatggaaaatgcactgtggtaaattacagatggctacaaacacttagccactcctcccagaaagaggtggaggctacctctcctattttagaactgccatggcactgtgacttgccttgaccactaaaatgttgagaaagtgatgctgcgtaacttctgggaaaaactttaagagatttgctgtttctgcttgcagtcacttagaatgctccttttcagaatctggcccctgtgctgtgagaagcctaccccacatggaaatatacacagaggaaaatggaggcagtggccaaaaacataagtcaagctcctagtcaacagccagtgctgattatcagccatgtgagtgaaccactagggccttctagcccagtcaagccttcagatgactgcagcccccgatgtcactatacggagcaggtgaaccactcaactgaacattgccaagccacagaaccatgaaagttagtacatggtgggttttatttccagtggctatattttgggatagtttgtcacatagaaatagagaactgaaacatgaagatatatttgattcatttaaataaatatttagtaattttctgattggctataccattttctttttaattaataccacacttaataggtaaatgtacagctatgtgtataatggaaagtgtactggggacatgcaaatatcgtttaagtacaattaggtttttatctagttatttgcaaaaatgcagcaatagacatcctgtgtgtggatatttgttcacatgtataaatatatgtctctaggttaaatttctaggaacaaaatgcttaataaatgacatgtaaatttaaaattttaatagacattgacaaattctcttccaaaggtaccatgccaccagtggtatgaatgtgcctgattccccacttccttgtacacaggacatggagatatgctcaaacctttcatcttcggttgtgtaataaatttttaaaaatcatttattttgcttttcttcaataacaattgaagttgttcatcttttgatatgtttatcagctatatttttctttttctgtaaacatcttttgcccatttttctactggttcataagagcttttttctgtattgaattttaataattctttttcctttttgaactgtaagaactcttagatgacaaatgaaagaaattagctctttatcagtcatttgtgctatacatttttttccacagattgttttttgactttttttttttttttaagagatggggtctcactgtacatacatcacacattttaagagatggaatgcaatggtgtgatcatagttcactgtaatctcaacctcctaggctcaagcaatcttcttggctcagcctctcaagcagctgggactacaggtgcatgccaccacattggctaatttttaaattttttgttgagatggggaccttgcccaggctggtcttgaactgctggcctcaggtgatcctcccgcctcagcctctcaaagtgtttggattgcagacataagacaccttgtccatggcttttttttttttttttttggcttttgactgtacatacatcacacatatatacatctgacacattttatttttgtctgattttatggtttcgtctttcatctaggcggaatttgtcttgctacaaggggtgaggaagggatcctgtctaattttttctccacaaatgtctagctagttccccatagctttcattgatcattgatttatcccccactgcttcaaaacactgcttggtcatatactaactgcccaggtatatatttgggcctatgtctatactctatgtcagtccattgttctctctgttcatatgccaatactgaaggctgcttcttagcctttccagtctgcatttcctctgagtctgctgttcgctgttggagccaggggctaaagtactcagcctgtactgtcagtcccggatagaatgcttccatttaaattctcatctaactcattctattccccctgtggattcttctcagcacttctttagaaagtctcctttccctgggtcatttctcccagactagaaaaattccttcccataatagctcttaagtgcttcctcttggtccttgtgatgagcttttttttttttggctttcctaggaatccttccactctgggccaaaacttcacccttcttgcctcccttgagaaagcagttatctttttgtgggccatccccatgcattcattctcctgcctgttcgctcgcttgcagtattacatggggtagcggggtcaagtcggtggagggtgaaacaggcgattggcaatactcccctccgcatccctgaagcaggtgatgatctccataggtcccagggtatccgtgccccgtttgatcagaaagaaacacacccaatcttcctcttccactgacttttcccgtgtgaaaggactccctggtcaggcggtattcatgccgcctggaaactcatctgcctgtgccgctgctttttcctggcagtttacaatgttatattgctaccaaagcgggcaaaatgaggatgtgaagtcgagcatctgagaaggctcagaaagtctgaataagcaatactggaataacaatgtactcctcaccaaggcatttagccagaaaagtgctcctgcttaggaattctatttgtttttctcttggaaaatggggaagtacatctgtaattcagctgtgaataccctattttctttgcaggggaagactggaaatagagtcctttatctcagatatcaaaccctggcccaggatacacaagaccaggagtcatcaccatcagtaacagtaacaacagcttcattaacaagttgctgttccgacgtgggctccggggtggggaaggaaggagggcgttcggctcaacgtccaggagaggcaccggcgaactcgagagccaagagcggcactcccacctgggcactccttgctgatggaccgggacctcctctcccatttctccggggcctccagggccctcccgcacattcagcatgatctctgaggagttcactagctttcctccctccgctctccagctcccgttcctaccaaatgcaccaatcatcactaagccaggtcaaaggccatgggatcagctgtgatctctcccttcctttttcattctcctctcctcatatccaaactgtcattaaactcagtgtttcttccttcaggctgtttcttgaattggtttcttctctatcccactattactgtcctgatccgtgctaatccaacagtttctgcccccaccccaggacagcttgtgttatcacggccaggtggatctttctagaacaccaagctcagcgtatcccttctgatcaacagagaaggagaggagagcctacactgtgctgggtcactgtgttacgctatgtgcttgtttcatttaataccgtcaacgaccatataaagtgtgtttgattatccttaagcaaaaaggtcaagaaattattagatcaatttcaagtcctcttcctggcattcagaactcgccccaaaatatggctgccttgactagttggctttatcatctcctctatcccaagatgacctttggggttccaatcagtcctatctcttccccgggagtaggggtggaggggcagcacccccgggcagaagatgcagccaaacaggaaagacagagttcacacctaactggctaaagtacaggcaaacacctgctaatgagtggtggtggcagtggtagggagtaggttgaactgtgtccccaacattcatatgccccaatacttcagaatgtgtctatatttggagatagggtctttaaaaaggtgattaagttaaaatgaggtcattagggtgcgtcctaatcctgcatgactggtgtccttataaaaagagaaaatttggacacagaggtacagagggaagaccatgtgaagatgagggaaggcagacatctataagccaaggggaggcctcgggagaaaccaaccctgtagacacctccatctcagacctcctgcctgcagaattgtgagaaaataagtttctgttgtttaagccacaagatcgtggtattttgttacagcagcccagggaaactaatacaggaggccgggcaggcattgtccaagggagctggagaggctgagcactggggcacgagggtaggtaatgatgtgagctaccttactgagcatcttctatacagcaagcaccaggctacgctgtgaacattctgcattcattatcactaatccttacacatgccctgccaggaagttactgtcacagccattttagagatataagatccaaagttcagggtggaaagaaatgtccctaggagacacacataatgagtatcaagtctggcattggaatcccaatctcctcctcactaagcccatgcttattctactattctgtcctgtgtccatcagtagatgggctggcatcagtggaccccagatctgtccacaggcagcagggccctgaccaacaggtggcttctcggagcagtgccttgtcttaggggggcatgttcactgaactcatgaggtcagaacacaggacttcacaaagctgaggagagaagggagatagctagctcagtgtggcaccccattcttcccattgagccctctcctcttcctgttgaagttcagcgtggttctggaagtacctgagtgggaagtagctttagcttcccacgactgttcaatagcattcaagtaacccttcatggcatgccgagattcctaatgagatgagaatacattctttaaagctccagttaacgtgtatgcagatgggagcttggaggactattttgctaaatgatgcaccctgtgaataaccatcacccccatatctactagggcaggcaccccttctctgtcctcagctggggacccctctcatcccacttggactcagagtccctggtgccccgaaggaaagcaaatcagcctcacttataattaagtgtctcaaataaagttttgttttaggctaaataagaaaagtgataccaagtcaaacagatcacaactgattattaagaacagatctactacagtttgacaactgccacaaacacaaatcttatttgggagttgctaaaactcagtaaatatcattttaataattaattaaactttaattaatgtcttgacagtagtctcaacctgataggcctcttcacaatgtgcaggctgtgatgaggatggtggctgctgggacggccaagggcagctaggtttcaggtgtcccctccttggggcaaggagaactaagttcactttcccccaagaaaaatctgtggtctacacaaatcaacctaaccactgaatcatcaaacactctgagaattcaggttaccaacagtgactgcaggagaatctaaagtgcttttgcatccttagagaaaaatctctgctccatctttttatggatccagtgggtggcagaaggaatggagttactgcaacatgacaatctccatcctgcctgatgcgcgagcacataaccgcctaagtttaaagagaattctggatataatttattatataagcctgtaatcccagcactttgggaggccaaggcaagtggatcacctgaggccaggagtttgagaccagcctggccaatatggtgaaccccccacctctactaaaaatacagaaattagctggggggtggtggctcatgcctataatcccagctacttgggaggctgaggcatgagaatcacttgaacccaggaggcagaggttgcatggaactgagatcgcgccactgcactccagcctgggcgacagagcaagactccgtctcaaaaaaacccaaaaaacaacaacaaaaaataatttattacatgagtagctcccaaatagcataattagtatcatgttagctgtaaaattaaacaaaaaagacttctgtccagttccctagaaattctaatttagtaggaatgagctaaaaggtctgatttagtaaggtgagaatttagtaggctcaggaatctatatttttaaccagttcccactgtgcgaggatgctgtgccagcaaagggcttcttcaagccacagagcctcccctcccagctgccctctctccactgagcctgaagcatgggcggcggtgggagccgcttcattataaaaagcagaacatccctaaaaacaggatattctagggacaccaaagagccgacactccattggaaacgcctcctctggggtccaggaaggccactccacagtggcgctgaactactgtttctcagcaaggtggtccgggccttctgccgtcagccagccacgccccactcccagtggtcctcttccgacatgaaagatgccaggaacaggaaaagcaaaacagcgcgcagcgactttcctactctagtagcattttctttctgtgtctctggtgagtcagagtttgtttgaatgtgaattatctgcaatcacgaaagtgacagtacagctggctgccgggcccgaaggaaatgtgtgctccagataagggcgagtgtgtgtgtgtgtgtgtgtgcgcgcgtgcatgcattttggggggctggggctgtcctcacttatcaaagcaattcccaaggcggcctctctgagtgaggcagggtctggcagggccgagcccctcagagccctctgccccgttggtgctgtgccggcgaaaggccacgcctcttcaatctggggcacccctgccgcctgctccacctcgcccgtccttgggttctggtcaatgttgggttgcccccttttcctagggatgtgggaggagaagagaaaatggaggtctatattgccacctcattctccgggtgcgggaaactttccctcagaggcaggacgcaggcaggtgaggatcacccgccacggcttttgtccactcatggtgtgagtctcaagaggagggaaagtgggtagggtctttaagtttggtactgtggccctctgaggttggcgacaacctgaaagctaccagcagagaaaagtaggtggagacagtgcttttggccacgacccgtttttgtcatcctcgttcctcctacaaaatgaaaaatggtccagaggccattcagatccccgcaccagtcactgaaaagaaaccagtttaggtgtccaaggctttttggtcatttactagacatttattgagtgccttcgaagctctggcgtggtgctaggtattaggtgctaggtgttaggtgttgagtgttgggtgctaggtgctaggcactgggtgctgggtgctaggttcctcatctcagggagctcaatctctcataggagtggcagataggtaaatagctataacaaagtgtgagaaacctgaaactgaggaagcacagggggctgtggaagcccacattgctgattcctaaccaagagcggaggagttggggctgtgaggatgaatggtctgagaaggccatttagggtacggactgatgctgggatgtgcagaaagggagaaaggaggctccatgcagaggtcacagcccatgcaaaggcctggaagccagagagagcctcatgcatttaggaagtagcggacaataggcagggtagcatcactgaagcaaagcaggtgggccaaggtggggaggggatgagggcagggctaggggcagggccccagatgtgaagcgccttttatgccattcttagaagtttggacgtcctcatggaggtaaaggggagccccaggatgcctcaaggtatgtaggaagatggggcaggaggccattgcagagacccaggtaagaaacgatgaaggcctgggacagggctgcgctgcctgaggtgatgaggagggaaagactccaggcttattaggaagtagacgcaacaggctctggtaactgacaggagtgtacattctgcagagggcgacagacattcaacaacaaatgacacaatcaactatgcaattaccatggtgataagtgtgctgagggagagtggagggtgtggggttccgtagggggatctgacctggccagaagtgggcgagacctccttgaagaggtgatgttcaacctgaggctgacgggcgaggaggaaatatccaggtgaggtgttgagtggggagcacggaacagcatctgaaaatgggttgcagggggagcacagtgcttggaggacctaaaagaccagtctggctagatagggcaggtcagctaaggactgcagaccaaatttgattccctgactgtttttgtaaaggaggttttgttggaacacagccacgccctctgcattcgtattgggtagagcagcttttgcatcacatagggccagggctggggaggggaaagggaggtgcccagggtgcaatactgaagaagaccctcactcccaggctggtgcacaagccacagcccggacagtcagtgcctccctcaattttgtacctagagcaccttacctgccttacacagttctggcctctctgccacaatacaatgacataatcaatggaggagttgcaacagagaccttctggttgcaaagcttaacgtatttactctctggctctttgtagaagcatgtagacccctggcttagagcagcataaagaggggagcgtgtggcccaggccgagccctgatactgttgcagctctggccacagccccttagcattcaactagacatgcagaagaaacctgtgctaatgcctgcgattctctgtgggacagcgggtgtgatggagtcacggagatgtgatggggggcatttgggaacatgctcattctgtcttgggcaaatggcatgtgctggagagtttccgccctgggaggcagccctctacacatgataggtatggggctggtggggataaatgccccaatttcctcacttctccttggggagaatgccacgtcccagagttgcacggtgggctgactgccagttgcacacagtggtatctacatgatgatgaatcctttactggcgtctttccttcctttcctactcacttcctccctcccctaccagggtttcctgggatcgccccctgaaacaaactacttgcatttgaatccttgtctctgggtctgctttgagggaagatgtgggatatccctgagctgcctgaggtgggggcttatgtaccaaatcccaccatagagaaggaggcccctgctgggtgatcagcggagttttacttacatgaactttcctcctgcttccccatcccaggcacccgaggcgtcaagccacagggtgaagactcaggcttcatctttttctcagattctaaactcacaccccacctttctgtgtggctgcatggctggggactccatcctcctaatgatcaggttcttgtgcaagcctgtgacactttcaccttgtgacaatgcccagacaactaatagagtctctgttttgccaccggataattgtttatttcctctttcaagggaactgtgtagaggaagaaatcagttgagaaaaacagtcttgagctactcaggctatccccatctattttgtgggggaagaaaactattcagcattttcaggttccttcctttcagatcttcccaaagatctcagtgcacaaccagggctggtctgggacagttgctgtgcttctgctctgccctggccagcctctgagggggtctccaaattaaaatgcaagttttaagtcagtgctctcctttcctggggattgttgacagctcaagaccacatgggctcatcactgtgatcttaaggaaagaaatgatcagggcaaatggctccaaatgaagatgaaaaagcttttacagtgacagggaagaaatattgcaggctgcttgagaaaatgcagtttgggaatataggagaacgtggaccattttgcaaatcaaaaacaagaggaaaagggactacagcacgtgaaacatactaaagagaagagcaaaaatgagattagaaataaaagaagggcaggcaaaaggaggaaagagaatgcgggggaggcaaacatcagagagactgcacaagagcaagagggaagacagagaatgttcaaacaccatccacgatgaacacggttgcagagaggccagtgttccaccgtcaagagcgcagaaaagcccttggtgctcctctgaagaatgcaagagcaatctgcagtgttattgactagtggaaaaatggctcctctctgacttagcacaggatgcaatttatcttcagagagtaccctccatacacccaatgttagttcttaggcatgaggttgggcaggagaagggcggaggaagaggtgtgggaaaagaggcagacagggaggtgagggggaatgtgggaggtgatgagaaagaaggaaaaagaagaaaggagatggagagagtgatagggagacaggaggggagaaggaggaacagataggagggagctatgaaagaaagagtaaggttagaataaagatttgggaaggagagggaggcggaggaagaaagaggaagggagggagctggagagcaagattttgaaactcttaaactaagaagagcaaagcagctaatatgtatggagcacctgctaggtgtcacgcattgagctaggtgtcatttcattattatttgatctcatgctaacaccaccttggtgttatctccctcatttttataggtgagggatgggtgctctgagtttcaataactttgcccagaaccacagcgttgaggctgtagggaggttaggattggagctcaggggacaaagcctgtttcagatgacacaggtcagccacatcccagggaaacaggaagggactgacttttatggatctctagctcccatctaagtgatactgatggagcacagaagattcctggggacactcactgtggcctgtgaaaacctgggcctccaaacaccagggggagctatcaccctggaagaaacagccaaatgcatctgaaaactggccatatcagtcaaagaaggtatttactagcctgagtgtgagtgtgagtgtgtgtgtgttggggggggggggaagtgtgggggagagtaacagctgattctttctagctgattttcattttatactggacctcatctagatgggatccacccattatttgcagtgggtgcctgttttgtttcctttcccctgcttgttggctgctgactcatttgccctggttacctgggaaggcgggaatgagcctagggcaggcatagagctcagcgcatccaagatgatttggtgcgtttttgacagatgaatgaccaatgggaggatgaacacgtgcttgaactggaagggttctggaagaagcatttgattcttcctcacccaggtcagatcaccatctcaaacatcactttaaaacaaagaacgccacaaagggagatttctttgccttccttagaccttcacgctggtccttaccttcaaggctgtcctcgctggactttagctgttgaacccactggcatcctttcggaagcctgaggttgggagttaggagagaagctaattattctatggtgtcttggatatgctaacaataacagctcccgtccaaggctgtcatgttatttaatgaaatagtggaagcgtgattatagtttataaactcaagtactttgacagtggtcactgctctgaaggtgccactgttgtacaagtggctatgtgaaccagcagtgatagaatgtcccagctgttggctatgccttaccctattaccctagatctattgactcagatgctttgaaagttctcgcggggaactgttccttgtagactctgctcaggcaggttggcgtggccaggcttgggaatggctgtcaccacacaccttgtcctccatcctcactcatctctgtcctcctgctggccagtcacccccacctagtggttctcgtctgttttaatgagttcagagtcattgccaaactaagtagtcagcttccatcagtgctattcttcatgttgagccacaacataaaacactttattgcaattacaaatagcaaaattattttctgccgagcctcagcatctgaacttaatggcatgctgtaatgccaccctgcgctgatgtgtggcatatctaatatccatctttcttagaaataacagtgttcagaaattagaagggactttagcagtgaaataattaatgtggataaccatcataaacggcacaaatggaacaaatacagatggtagtgagccgtgattgctaatatgctaacctgttttgacagaactctacattttttcattgggaggttcatggatagaagttaaaatatcccttgcctcatgacaagagctttgtctttctgggtaagagattcaatgatctcctacctgggcaaggtagcatcaccggaatttgcgctgagaggagggcttgcatcccagctctgggctctctcacacccttccatctcctgcagccacatttctgccctctgcctcaggctcaggcaggcgggcccacccagaactgcagccagacacccacctcttctgtgctatggctctgagggaggggcaggggctccctggctgggctcactcagtgggaagcagctctttgaagatcctagctgcatgcaggtgcaagttgcggaacccaactccaagaggctgcacggaaatgaaaaattgccatagaaagatgactcaccaaatcacagacactaagctattgagacaaatataaggacgagggtgtttgggggcactggaaacacttggctgtgcctgcttttggccctgctggcctttaagcagcattagcagcagaagggccatccaagtttctctggatgagtcagaggtcctcagagaaatgctggagggcaaactggggaaggaaggtagaaaggatctagctttaacttattaaggataagtgctgtgctttacacatattttatttactctcaataataatcatttgccgtgggcatggtaagttaatatttaagatggggaacctaagaattagacaataagtgatttgccaagttcaccaggggcagggaagctatgggcagagcggctagggattagggtcacaccaccccggccaggagccccattgatacgatacagggggcctcactgagtctttctgccccaggaagccaagccctcctctctgatgctgaatcccagcccccttctcccactcaagggcgttgatagaaacctttgtctcctttccctccagagtcatcattccccctttatttaatcatcttcttacaaatatgctgtaatatctctaacttttttaaaatggagaagcctttctcatgtttgttttcctcctgctatacctcctttgctgtgttctcttttacagaactcagaagagctgtctctcactgtctccttcatctagacaaacgcatttcccttcattccgacactcggtaacccacttattctggttttgtctcaaatctaaaaatacgccactgaaacggcttcttcctaaattaccaatgactccatgttgacaaatccaatggtcaactccttgttgacacaaatggccagctcttctgtttgaacgccttcttctcttagcctctgggagagcagtctcttacgggtctactcttactcacagctactccttctccatctcctttgctagttcctccccatctctattattcccaaatgttggaggacctcagggcttctccgagctgtctacattcactgcctaggtgatcttacttagtcccatggctttcattccacccgcatgctgaagtctacttccttgctgggcatttccatttgaacatctcttaggtttctaaaatgtaactcatccacagccaactcctgccttcaccacacagcccctcccgctagatcctgtcaaaatcatccctatctcagccaatggcaacttatccttccttttgcgacttctaaggccacaaccttagaagtcatccctgatgcctttctctaatactttatctttcaatcttttatccagaaaatgaccacttcttacaacctctgctgcccccaccctggtccaagacagcatcaccttgcatctgttgaggctcctgagagacgccctgcttcttccctgcttcagcctcttcttaacccagtggccacagccatccttacgcaatgtagcaatgtcagttggatctgatcgctcctctgtccaaacttctgatggcttagggtcagggtgtggtccctctgcctctgatttcagctcctactcatccccctttgactcatctgcttcagctgaactaacctcctttctcaagccaacctgcaggctccctcttcagcttcttggtccttactatttttcctgcctcttgactttgtcttatgtttcttcattgaacttattgcctgacacagcatatatttatttgtaaattgtctgagctcccacttgaatgtaaactctttgagggcaggggcttaatgtgtttgtccactactgtatctccagtgctcaaaatagtaggtgccaaataaatatttgctgaggggatgaatttagacctggtgagactctgcagtccttgcctgtcccaccagccctcacggcagtgtttgcatgcaggagatgccatgtttgcatggtggggctgtatctgcctggctccctagtgatatgaagttctaaattccaatgaaatctcaaatccctcaaagaaagattttaccactctggttaaaaatcagacctagaggaaatatgctagattgcagggtgtatctaaggaaataaaagcattaggtgggtgaaaaattgcaaaaaacaaaattactttcaacttagatctgaggagtttaaattagttcactcccatgcccagtgtaggtgaagacattcaccacccaaacacagacactcttgagagcgaatgagagttataattatcatagttatgttagggctgcaggcacaagccaagactgtcctaggcaaaccagttatgatcaccctcatgagagagaaaggaattggcttgtggctgggccagggcacatgcaaatgacgctgtagggctggcattgaagaggaagcctgggagaaggtgggagaagatagcgaggggacctggaggagaggagtgtccaggaaagggcagagagcaggaagatctggagtcatacattaaagggcaggggcagggaacaatctgggagaaaggtctatttcatgtgcttgagagaggggagagagagaaactgggattcctagggaagaagctaattgggcaccagccgagctggcaagggagggagccctgaaatgagaacaattttggctgagagccaaagtgttttctgagacagactgaatgagaaacaacatggtgatttggaaagaactttgagactagattgacttagtctcaaattctggtgctcattcgctttgactgtggggatgacactgcttgtgcttagcctcagtttccacaagacagcaccttccttaaagaatcatgaggccgggcatggtggctcatgcctgtagtcccagcactttgggaggccgaggtggatggatcatctgaggtcgggagttcgagaccagcttgaccaacatggagaaaccccgtctctattaaaaatacaaaattagctgggtatagtggtgcatgcctataatcctagctactcgggaggctgaggcaggagaatcgcttgaacacaggaggcagaggttgtggtgagctgagatgcgcctttgcactccagcctgggcaacaagagtaaaactccgtctcaaaaaaaaaaaaaaaaatagaatcatgaggaataaataagataacacatgcaagacatctaacacagtgcatggcacagagtaggtgcctctctggcaatagcaaagaagcctgctcaagaggacagagattgaaggccaaggcttcattttggatttgcagagagaagtcaggggatgagcttgagcccccataactgcgctctcccctagggtctggcaaggaggccttgatactgaaggaaggatgataacagggtgcgttggagggacagctgcagcttcacacctgtgaagagccatctgggtcaccagcacggtccctgacataggacagctccatgtggctgatactgggatggtgcctcacagtcaaaaagcctcacagtccaaaagcctttttgtgttccagaaccatttgtgagtgctctggtcagaagcgaagggttcccatggaagtccttccctgtgaacaatgtcaggaccccttagcatggcagtcaaggctcccaatgatatgtcataatttccacttccagccttgtcttctgtctgtaactctactgtatatacctcatgatcctgccaaactgttcctcaagcacctgctgtcacttctctcctccatcccaatctatctgcctgaaaacatcctgtttccagtcatcagcccttggctgacacttgaacatggcagagtcattccacccccaggggtctggactagctgttccctcttcccaaaaggcccttctcctggccatctgcatggttcactccctcacttcctacaggaagtctcattcaccttttggggatttttttccctactgaaatttgaagctctttctccaacatttcttgtatgtatttatttattcctgatttatgttttctgtttagctcttctgactatctaacttacaccatatcaggggttggcaaacgatggcccttggggccaaattcagtccactccctgtttttgtaaataaagttttattagaacacagacatgcttactcatttatgtattgtctatgactactttcatgccacaatggcaaaactgagtagttgcaaaaaagaccacaagatctgtaaagactggaatgtttactgactagtgattagccttttccaggaaaaatgtgctgagctgtgctctaactcatgcatgtcatgtactttatgtcttccccactagaatgtaagctccgtgtggacaaggatttttgtctgtcttctgaattactgcattccccgttatctgggaaaacaactactcagtacatatctgttggatgaatgaatgaatgttgaaaattctattcattggcaaggcctagctcaaatatcacttttcaggaagcactcctttgcatcatggtgatttccgcacgaaatctcatttctcttactagatggtaagcttcaagcgtcacctctatcatgaaactatcctttgtctcccacggtggaattggcctttcttcatctattcctcttacagtcttctgtggctgcacatagtgtacggtaggtattgcggtatttgacacatgttggactctccacttgactgagattaagtgggtagggactgtggtttgttcgtctccgtcccaggcatctatctcagagcctgcagccctgacacattgcaggtacttagcatacagagctggatttcccccactgaaacctccacagccctcctagcagagacagacacacttttagtaggggctaagctatgtttgtggagtagaatgaaaggcaaagggaacagtgctgagccagagaacacagcattagtgggagctgtggagaggaggctagaaataggcaaagaagggaggggacaggctctgtttcatttcactctaccataaagaggtaacaatttaaaaaaatcaactctcctcagcctccagacacacatgctctgtggcatcattaagcagctggtgccaacatttacctcacacctcccttagtaggcaagaaagcatttcctaaacccttctcctctatgcttttaaaataaaggccttagtggatctcaacttcagcaaacagaacattttctacttttctatactgtaagatttttgaaagcagtgactgtgtcattcttttatattcctagtacctagaccatgatgacataataatagatgcagaattaattttcattgagttacataaatgatacaatatgaaaagagaagggaagaaggaaagatggaaggaaaagacttgcacagatgctctttgtgactcagaactttggaaaaagtccaacgagcaacaaaatactcaaaatactttaaatgaaggtaaaaaccatcattgttttctctctgcctagggtttttaggaattttcttctattcaagatcataattgcagaaaactagaccaatgatctgattgctttcataagctccatgatgattaaaagaagtgtaggcagctccaaggccacacatgaaaagagaaatgctgaggctgttccatttgagcctttttgtcttgcttggctctttgtcaaaaccaagtctccttctggagatagagatgcagatcaccacctaccccaactgttcccacttgacttaagagacaatgtggggaagaacatcacccccatttcaaccttcagaggcaggttgcttctgccacggcaaggagaagatcactttctgtgtaagatttctgattcctgtctcctgcaggttggttcattttctttcaaacacctgtgctgtaatatgctaacctgatcctaagacaggccccaactagtacacacgcagatccatgcacacccacacacatgcacatgcagacttattgtcatagcttgtatctcttatggacaagatgcagagtgagtgagccagcagatggacaccctggaggttcggagccatgtcactccctatcagccctctccaaacatccaggcaggatctgggagggactgcccttgagatgggtgggctccatgaatttccagctgaagcaacacgtttctgtccccaagggatgaagaagtttcttcagctgctctgtagatatgtcatgtcgagattgaattcaggtatagttttagctgccttccttcttgaaacttccctctccccgtttgaattccaatgaggcatcttttgaatgctgagattgggaagcaagactgagacctgcttatgggccaagggttcttagtattagataagagtcaggattattagacctgcctatgggccaagggttcttactaatagattttgaataaccataaaaacaactttcctgcattcctctttatcatagatcaacttgtcagttagtcattcacttaatgagtatttattgtaccttgactttgtgtcaggtagtgtgctaggtgcaggagtagatattcttatttctgttcttcagatgaagagacagaggttcagagaggtgaggggtttcagtggaaagtggccgagtcaggaatcaaaagcctgtcttctggtgcctgcttaatggggttttaaccaatgtgggtattaggtgagaggtggccaggagaaggcaggacattaggggttatttcttaagcctgtgggtaaccactgaggcagcaggccagaaagtcacgtgacccagtgtgatgtatgggagaggacagcgtggtgcctcgtatgccatgaagaattaatctcaaggagatgctagtgagctccagagacttagcatcagtgccaagagatcaaagatatgatatctctggcagagtgcgctatcaggagcgatcaaagcaaaaaaaagggttcatttcagtgccctgtgcattagttgcctgacttgctgactctgggcacaaaggaagcagtcatggtttggaaatggtgctaacacccgcatgggcatttctttcttgacatctccatacatctcattgttgcctgtccataaacaaaaacattatcatgcccatgggtttgcccccgctcatccccaagctggctgtccccgttttcttctgagtgtgtttgtgtgctcagtggctttcctgccttccttggatgatggtggtagaggccgtccttgtctggaggaggcctgtcagggtgcactgctgcaggctggaccctgagcccgctctgccctcgctgcaaggctgctgctggggtggatgtgcggggctggtggagctctgtggcctgggtccagtctgcacaaaggcagggccagggactacagagagcatggggggaggcatcaggattggccaccaactcactgagggactttgtcaagttgcttcccctcgctgagtctcagtttccttatctgtaaatcaggcagttggtctgtgtcagtaactttcacccccagtttctctggtgatgtaagttttccaatcaaattataataacccaaatagaggagatgccccataaatacttcttgaatgaatcaaagcaaatctataaagataagcatggaaacatgtggactgcagtggacagggccctggagaacgcccttctgagtgccctccctccattctaaccccctgtgtcccgaagtgggtctctaaggcccttctgtggaaccctaaggctccactgaacccagcttgacaaccacaaatatggactttcttgtttcttaaagctctgacattcagtgattctaggggaactattaagtctcaaatcccttacaaattaatgaaagatctctgacatattttctagaatttttcctcagaaatttccctggacttctctggggctatcctgttggctttatgaaaaagtctgaactacacaagatgcctcctttttttctttttagatggagtctccctctgttgcccaggctggagggcggtggcatgaccttggctcactgcaacctcctcctcctgggttcaagcgattctcctgcctcagcttcctgagtagctgagattacaggcatgcaccgccacgcctggctaaattttgtatttttagtagagttggggtttcgccatgttggccaggctggtttcaaactcctgacctcaagtgatctgcccacctcggcctcccaaagtgctaggataacaggtgtgagccatgtgagccactgcgcccagccacaagatgcctctttatgagaggatccagtctacctttccagctgttttttcccactcctatcatttcccttctcctagcaaaactctgtattggcctacacatgccaatgtgttgagcatgccatgcgttcttgtgccctgcatctttgcttttgccattccttgtgctattgtttttccactttcttcctgcaaaactcctattcatcctctaagacctggctgtgatgtcctggctcttgaacggttctacctctcactcactcacacagggaggtcagctgcttctttctctgagccgccttaccctctgggacacgcctccagcacagatttccgcgtagcctaccttcactcatctagatacatcatcttccctggcagatggagtgcttctgaaaggcagagacttagctttgaattcccagtgcctagcatggagcctggtccataaaaaccactccatccatgttcatgaaatgactgagaaacagcaagggctcctgtgcacttgggtgtggctccagaagaggcagcttctgtggctattccccttggaggccggctggccactctccctgcacagagcaggctggcttcgccatcacaggctgcttctcagaagctcagctacctctccttcctcacctcccagacccctcggaaagtgttccccaccagaaatgtctttttggtggcctcaacctgagaaggaaggctacagagcttacagatttaaacttaaatgcataaacaattcacagtggtcccctggcttaggctgaatctcaacttggaggacttggtgtccatggtaagtctggaggcctgaaggtgggaggcgctcagctgtctgcagcagctgtaccctgcaccctgcccagcaggcatttccctgctacatggctctcctcccagctccctcgggggggtctggccctcccaccctgggtgagctgcatttttgtggtcctccttcttctaatctctctgcctgcctcacaaagtggagaattcgattttcttcccaaagaaaatcagatttgacttagctccatccattttcacaattgctacggaaacgctgtctctgtgaggacaaaagaactaaacgaaggactttcagtgggggaatgagcacgtggacacaactgtgcctcagtgagaatcccttgcagacctgggagagacatctgcaggcagtgggatgcggatcagaagccctgggtccccagagtccaatgatgaggagacccggagggaaggaattggcttgaagtagggctgtctcgggggtgagcatttctcccgcagccccacacccagcagctctgagagaagccagagcctcctgatgcacctggcatgacactgggacaaaggcaatccattatgtgactggtatatcagagtcacagaggggctgggtgcagcagggtaaagaggctgcaaggtcacagatggacaaggtgtggctgtcacagctgtggtggctggccccatgaaataattgggacaccaggaggggcagggtcagaggacctctaaatagctctgtagtcttgggtgagtcacttgaagcccccaagcctcagctttcccatctgcagaccagggagaaatatcacctacctggtggggtgtcctggggctcagtgttctcccgtggcatgctgcacatgcctctactgtgcatgagagtgtgtgtcccacctcccaccgtgttaaagcatgttgaccatgggtgtgctttcccacaggagtgtaggcttccagagcaggaaggggtgcgtcttactcactgctttattcccagggccaagcaccctgcctggcccctgcggagctcagggtgtctgatcacctgagtgagatgatgttggttagagtgcttgccacctgctgcacacaggaattagcttccaggctgaagtggggccagtgtagggcccacaggaacctggaccaccttgactctttgtatagggaggggaaaggaggcaggagaagccctgagtacttgtcagtggagtgaagcctgttaagctttaagcgggaggattcagttcagtaagtaacttcgtcccctgggagggcccccaggtcccttctgtgttggctccatggcctctcttctctcctgcattaattcaagtgaggaaggcctgagcttgcctccctgaattccctgcaccccacagacgctgccccattctcaaggtgccatgtgtaatcaggaagcagacgctagctccaaagctttcggggcagagggaggagggcaatggctgggcagtgggctgtcctgttgctgaggagaccttgaggaggaggcttttggggcaggcatgcctgttgcaggcttggagtgggccctggggaggggcagtaccctctaggccagaaaacacaactgggccatcttccctcatctctagcagaatggctgcctccttagtccagactgagtcctgtggaatgtgtggttggagcaaaaagatgaagagtgagtctaagaggtcatgaagaaggacagacccagtagactgtggctcagcctttcttgggaagcagacttctaagaaacaagcacgctggcttaacaacaaatctaattcttttagggaaaagaggtagtgcatggataaaatgtggaaagatatagaagaagaaacaggaagtggagcctggtgaggaacaaaaggtgtcacaaggctcattttagggacatattgcaggagagacaggaaattgaaattggcgccattcttctagattgcccagagtcctccagagtcacagggggagtcaaagggtcaataggtgcttctcctttgcagcctcagggagtgattacctgcaatatgccagggtactgtccctgtaaacaatgaggctggaaggcaagaaaggagcagctccctggcattttgctgctggagcacggaagcagtgctggccaggagctcacaggtgggtgtgaacctggggaccctccgtagatactcatggggccccgggcactccactggacaggtgaaaagctcacagctcagggtcccctgctattttatgagcttgggaggtttctgtgtccagaagcacaatggagggagcccctgatcataatcactaagagcacaccatgtttgctgcttttaactgtttccaaatccttctagttcataggctcctctgctcctaaaccagtcctttgaggtatctggcagacagttttctgcccttcccttccttgacatttctgtgacatttggctctgtgacggcttccttcttcaggaaactcttttgttgtcttatttctgggacaccctcctccggagtttccattccctctcagtccccgtcctgactctcattcctgtccccagccacttaaatgttgatgtccctaggttctatccccagccgtcttctcattcagaattcccctcctcaaagtagattcatcactcccagagacatttacatcacgtctccacttagcccttggccctggctctcagccccgcagaacccactgccgactagccccatccacatgggggcccacaggccccttgagtgtgacacgtccaaatgagttactcaccttctcctccctcttctcatcatctctgcaccatcaacatcccctaattgtccaccagaaatcagggaacaatcctggcctccaccctctcctcaccctatacgtctggtcaatcatgccttcctctcaacctgactcctacaggtatcttcaacctgtgcccattctcgcagctctgagcttattccatactacataagtttgcttagactggtggttctccaccatgggtgatttttgtcttccccacctaggggacatttggcaacgtccagggacaatttctgatggtcacaacgaagtggttgctactagcatcaagtgggtagaggccagggatggagctgaacacgatacaatgcaccaggcggcccctgcaaccaagaaccaaaatggcggtagtccccaggtaaagaaaacctggcttacaacatgcaatacttttctttttctttttttttgtttttgagattgagtcttgctctgtcacccaggctggagtgcagtggtgccatctcggctcactgcaacctccgcctcccaggttcacgccattctcctgcctcagcctcccgagtagctgggactacaggcacctgccaccacgcctggctaatttttttatatttttagtagagatggggtttcactgtgttaggcaggatggtctccatctcctgacctcgtgatccacccgtctcggcctcccaaagtgctgggattacaggcgtgagccaccgcgcccagccaacatgcaatacttttctaactggtgtctctgacaatcaggttccccttcaagccactctctttgctgcctcctgcgagaatgcttagcttacaaatgaatctgtctgcatgtctccatttcctaacttctcagcatagtttacaaagctccctatgatctggccctgcccaactctccagacccaccttccatttctcctgttagtccatgccccagcagtactagataatctgccgttctctgagtaaatcatgttcttccatacctctgggccactgcctaggtctcaaatgaccctatcccagggtccatcccgctgtgtccactgtttgcattgggtcagagcttacttagtccttcaagactcagcccgaataccatttcctggacaaagctttctcttggctatgcttctaccacagcttgtacgtattctcatgtctacctttcacatttctctttctgcagtcttcttgaggtcacagatgtgattttatttatctttacagacccaatgcctagcgccatgtctggtgagtgaatgcacacaggaagaaagctttgccaaaatttgcacacctcgttgctggaaggactaggactggcattcaggtctttggactcccaagctatgctcacctcatcagacctgatggctctaagtaggtcagttttaggtcctgagctacttgatccatctggctcccagttagagaacaacaagaaactaatcacatgtggtggctgctgcctccgtaagtgcttccatttattcacaagctgaaagacaaaagcttggccccccagcatatgctggatcaaaagcaaggaacaaaaaggattgtaaaagaaagacgctggaaatagtagctactttgatgcaggcagctctttgaggaagcagctgaggactgtgcccccagcagcaaagagagagagaagtcactgccagagggtgaaggaaatcactgcaggaagggtgggacctcactggcttctctgctggtttccagcgagtgccaggaatgggggaggggtgtctcattaatctcacctccttgctgccctgcctggggtctttacaatctgctccatttggagactaaggattcctacaggaatggcaatctgagccagagatttaggaaggaggtttataagtaatggctagagcgatagagtaattaataggaaactattattaacaatacagtgatttcataatgattccgcagtttataatacaaatgtatacatcatttgatgaattattgtattgagcccgaggatgcaggaatggccagattctgtccttgaaatagccaccccttctcatgaggacccctgagaaaatatagtaagcacacaaagaaaggaaagcaaagcaatgcttcattgttagctggacttgtgatcaaaaccctagcgctctctggtcaactggactagatgacgttttctactaagcaagttaggactaaacagctcataacaacagccaatccaatatacctgcttgtctcgggaaagtgtagtcagctgcagagagacagtgagagagtgactgtttcctttgaattcctgctctctggagttgacttgggcagcctggctctgaaccaggacaccatctctgggttggtggccatctgagaaaacatggagaaaagacactttgaggaaggtaacctcgtaatgctgagaggaagcttatgcccaaggagactccaaggagaatttgggatctaaccccagagcactgcagagtggaaaaggccagggggaaccccttatcttaccagaaaaccaagcaaaggagatagcaagaggctggactgaagttaaagaataatgcttaagtgtcttgtttgggactcaaagggcttgccctcccattgtattcacagatacagcaaaagactttggtgaaatgcaatgtggaaggaggaagattggttcccattgtgaataaggaaaaaatgagtcctggggttctgaaggcagcttgagatattttgagcatttcacctctgaagtaagagtgcaaccctccaattcaaaagtgtaatttctagtccctttgttgaaaagtcagttatgaaactttacagtttcacttttggctttcggctgaacttttcagagcctttaaggcaaggtgggtaagtatttttagagatggtaacgaggcctgggggctatgcacacagctggagctcagcagatgtctcagaggagaaagatgagaacctcagtcatggtcaagacccctctccgaatggcttctcatccctcagacccacaagagaggtgcatcgtaagctcaagacacctgagacaccttaattctcttccccagccctctctctgtcccttgaaaggatgcaatgcgctggggagatgaaaccagtttgcatcttaggaaggatctggattgttttccttctttctctgagctgtcacttgctataaaagcgatcattgatattcagccattatgccattatacttccataatcattaatattcttaaaaggctcttgaaacacatttatacaaggctacatgatcagttcctacatttactttcaatttaaataacagttttagccagggttttgatgtgctgtttactttaattaccatcctgcccctttctgtgtcttgacacagtgtcatttaatattttatgaatttcccttagccctttttttccctgatatgtgtgatttgaacgggttgctgcttttttagaaaaaaatttgtagttttaacttttctgagacttgctgtaaacaagatgtgtcatgcctatggattctcttcccccagtgataatgggaggaaataaataaaacagcagacagctgctttacccagatggcacagggatgccagggggttctggccctgctgcaggcacagagtgacaggccagcaacttcaggtgaggtgggaagcagcccagaagaggtcagcgtctgcctctcaaggtgtgggctgtcagcatgaggatcacctgggagccccactccagaactactgaggcagaagctgcattagaacaagatccctaggtggtttgtttgaacactggagtttgggaagcactgcactaatggaaatcaattagtggatgtaaagaaaataggcatttcacggctgttctctcccaagtcccatgctttcatcagaaaaaaagctctacttttgggatctatggcaggttcttggggtcatttataaataagtgctatactttaaatactgtgttcatgatctgcttcaagatttccccctctgttttttcagtgatccatttgtttacttaagaaatatttggccaggcgcggtggctcatgcatgtaatcccagcactttgcgtggctgaggtgggtggatcacctgaggtcaggagttcgagaccagcctgaccaacatggagaaaccctgtctctacgaaaaatacaaaatcagctgggcatggcagcgcgtgcctgtaatcccagctacttgggaggctgagacaagagaatcacttgaacctgggaagcggaggttgcagtgagccgagatgtcattgcactccagcctgggcaacaagagtgaaactctgtctcaaaagaaaaaaaaaaagaaatttagtattctatgtactaggaattacagaaagtgataaaggagactgtgtgatatggtcagtaacagagtgtgtcaaagtgctaaggaatcacagtggtggagactgatgagcaggtcagagaagttttcgttggaggggtactttctgaacgattcttgaagaatgaatgggagttaggggtggttggggaggacagtgttaattgtggcaggatggggtttgtggttggaacggtgctgtcttctggtccagctgtgcctggctccgaccaagggcagggtcaatgtgcactgcctgcagcaagcatagcagtttggcagggaggctcataacggggcgtttacccatcctcagaaagcaagggctttcctatgggactgttgttggctgctgcctgatggaggaacatgcactggaactcggggctaggaggttacatgcaaactcagttctactaattgctagttggggcctttgatgacaccttttatgtctctgtaaaagttgtaaaatgtgcttctgtgagggctagatgagataaaacccatgacagaaactggcagtcggtagtaacattagctgggtctgaacgtgaatccacgtttgacgagtacgggaaggaataatagcaaagacaaggagaataagcccaggtaagcatctctgggatcctagaacaacagagaccattgcatgaccaactggggagacagagaaagagagcttccaccggccccatttcccacctcctccacctactctttgttgacacttaatatagaaactaggcctgtaactggcgacagatcaatacttccactgaagaataaaacctctcatggggcagcccagaccagggatatgatctcaataatgtgcgtcggggaattggggcttattggagaaggtggctttggaggtaacaggcagctgtcaggccccagaaaatggaaaagaagtggatatcaaaacctgtaactctggtttagggacagatattatttccttgtctctttctgtaggaactgaagtcaattgccctttaggcagaaccaaaccaaagaggagacataaactcattttgagtgaacaaatccagctaaaaattactttctcattgcttcctttctcagatacggcatttatcatgggtaacagatgaatggataatcttaatttaaaggcaaaaataagggggatccttcctgatactgaaggtacaaaataaacatcccagtatttccaggcccccaccttccaggcattggcaattcagcagaggtctgggtttattctccagttattactgcatttatgaatcctcaattagtcctgactttgcttgagagtttttatgaaactgcctagcgtagtgcctagcagagagtacatgttgaatacatttattagtttctttctttccatagctactgctgctggctaccttgcatttctgtggatttggtcacaagagggattgtctagagagaacagatggtctggtttactttcaattgtagtcacagcaataatagcaccatttatggggccatacactatacgctagaagttttacacacatttcctcatttaatactcttgtgaaatgtgcactatcatctccattttgcagataagcaaaccgaggctcagagaagtgaaatcatttgacaagtcatacacagctaaaacgtagatgccagagccaggatttgatgagaggtccccgtgacatttcaacccaagctgtttttggtgttcatatcactttctaaacagagaactggagagctggaaggaccctcagagatcatctgggccggtggttctcacctgggggcgattttgtccccaggggacatttgagaacatctgaagatattttcggttgttacaactaagtgggggagtaggggtacctgctcctggcctccagtgaggagcccagggtgctgctaaccactctgcaatgcacaggccagcccccatgacaaggattatcctacccaaaacgtcattcgtgctgaggttgagaaaccctggtctagaccaatctcctgattttacagataagaaaacccgggtgtgggtaaggttaaaggtcatgctaatgtccatggacaaaggctgctgggaatcaccatacatcccccacagtcctcccccaccctgtgctgcccaggaaaaagagctcaaagggagtgccccagactggctgtcacaagcatggtgtggaaaggtcctacttagttttccagggagccagcaattggttacatcagaaaactttattctcaggggcagtgcccttatttagatttcagggaaaagcaaaaacagctaaagttttctcaaatagtaagtttcccaatttgctccggttgataattttctaatgtagattcagtggaatctgcctgagagggtgctgagtggggatgtgcttgccaaggggaaaatgaatgtgtcccctgattggaggccggcttgtcagacaactgtgactgtcagcacactgggctggggcctggcctcaggaagggagtggggaggagcagggatggggcctggggctcaggaagggggcagggaggagcagggatgcaccttcagggcagagagggtgctggtggatcccagctccaaagcacagagacggcacaaggcacagtgggcagggagagggcggaggagggagtgaactgtcccccctcctctgtcatgcctgcatcactgcccgggcagtctccacagtcctgggggcctggggaaggagtggaggggacagacgatggtctcctgagtcacaccgccccatggattctggggaaggatctgggcaaatctgcagcagctcggagtctcagtttgtttccctgctggtacgacgatggcagtaatacccgtgctggataaagtgagagactctcgagacacacagtacatgcctgcctcttccccagctcggaattctccagtagaggggggcatttttagacacagtgagctagaggaggcttttttcggtttcttaattctaaatgtttaattattataggcacctaatagttgtatatatttatggggtacctgtgatgttttgacacaagtatacaacatgtaatggtcaaatcgggataactggtatccatcaactcaagcatttattatttctttgtgttagaaacattccaattctactcttttagttatttaaaaatatacactaaaatactgttaactacagtcaccctgtggtactactgactattagatcttattcttctatttaactgtatttttgtccttcctcattaaccatcccactttatctctcccttcccactacccttcccagcttctggtaaccatcattctccttagtgagggctgctgtttgcagaatgttggccagggcaggagaatgtaaatacacgagtatacctagaccttccgatatgccagctgccaagcatgtgccaccaacatctaagcccaggaacaaaatccgacgcattttcattcataggggaatgaaattaattaattaattttgaattaatcataggggagtagcctccaacagcccctgttgccccctccacccctgtcttgccttatctggtccttttcctttgagcaggtgagcgctctcttgcttcctcactcagagattcccagtcacgggctgcagctggaagtgggtttcacagaaggtcccaggctggcctcacctgatatgctctgtgtggacttcacttgagtcctcagtgccaaaggcaggactgtatgtgatgcggggtttgcacagagcactaatggagtccgttagtattcagactgagtttcctattttttttccccctaggagtgcaacactgtggttcaatatttgctgggtggtaattaatagcacttaatctgtaaatctggagctggtttctcatctgctgagaaatgaggttaccatagccaccccatgtttggctccttctctccttttcccttcccagaaatgtccttttgtgtttttctcagccctagcagggctcacgacaagaaggctaaaagcacccagagagatttgctgctgcattagcaggcagctacctgaaagaaaagtttatgaagacgagaagaaatgggcttccacccacctcggaggcctgatgtgctgtcacaccagacaatcctcacaggcagaggagtctcttattcttccacacagggtcctaaacaaagcatcttcggtgatcaaactatgatttttttgactgcctactgtgttccaggtggctcagatatatattatctaattctcataacactacaacaatcttgaaaggcgggtatatatgatacaaacggtacaaatgaagaaactggctttcagagagaccaagtaacttgctcaaggccacacagctagaaattagcaggatggaaactccaatccagactgttctggctccaaagccaaacccttccacccgttccgtgctattgttggagatgtgaattccactgatgtgaatttctagccttctgcatatgacttgcccacagagcattaggtgatacttatagtattaattcgactgccttttggcatggttatggggcttctctgcaaattgcttcatcctcctctgcataacacccttgtgtaggaggctgggtagacattactaaattactttcactttacagatggagacactgaggccctgagacatgaagggatctgggtaaagcaaaacagctcttgagtagtatttgctctgtcagtcagtgtgccaggtgcaggtagcgtcatgtgccctacctgggtcttaaggaatgatgagatccaggcagctggtgctgacagtggcctgttcatactcttcctgaaggtatgtcacctggctttgtatgacagcatgttaacaacatctgtaatttgggcaggagtgaggagaaggaaaccacagttaaggtatgtgtggaggtactatgcaggcaaaccagcccacaagggatgctctggtcactggtgcagatgatggaaaacacctaaaggagaaccgtagccaacactgcaaatcaggcagcatgtatcagagtttaaaaacctcagggagttttgggccagcaaataaaatgtgctccattttgccagagctgaggggattgggcaagaaggagcacttagaattttgacactgcactttgatcagtttgacgggtttagtattatagaaatatttcattgtttcagcagagatgaggaaatctaatcatccatacagctgcactctgaatttgtcatgactcactggagggtagggtgtatggagggagggggcagagaaagaaaggaagaaagaaagaaacagctgatttaaaatgcagtttaacctgaggtaatttggcccattagttcaaattgtgtttttttcttccctccttcttttatttaagtcattgctctattttcaagatattattttttagaggtggcatctaattatgttttctctccacattcattttgagcaggtaataaaggctatagtgggggagttctacggtgattaatggaagaaaatgcagatggggctgaattgaagcaacagcatagaatatgattttataaacaggatagaaagaaattaaagtgctgcattgctaaactcagtggagatggtattcattctgtgtttggtgctgcagtagtggtctggaattgtctgcagaaaagtctttctggatataccagaccagcctttggtgtcactaggtcctctgacttgagtgtgacacaaaagccccccactcacagatccctctcctacccaggagacatgttccttatatttgtgatgtattcctatgggcaaagtatcgctctagcccagcatccccttttgtcttgagagggaaggccaataagataataatcccttagcttgactgtggctccaagggggaggtgctagtagaggggctctagtagggtgtcttgatggggcacaggggatggggctagggacagggagcacaaaaatggcctgaaagataaatttgtatttttgcattgctgggctaaaatatatcctttccttgttgggagcagagagggtaatccttgttagatttacattaaaatgaggtcgtgcttcttggaaaaagccactcactgagaaagaagatatccattgttccatgagagtcccccatggtagagtgagtgacaaggttcttggaaatatcatcagatagtgcttactttggggctgagtgagaataggaaagtggcagaacagggaaaaggttccaccacaaggagctcattcctgcagacccggaatggaaaaccatctcctggcattacataacacaggccaactctctcttcttaacaacaggaagaggcaattcaggtcaaagacagactctcctttcctatgcagagggctcttgtcactttgttaatttctttgtttgtgcttcaccttctgttctccatttccacttttcccactcccttggagcacagatccaagttttaatccagatgcccataatgctgctcacccatcacctacctgtgatatggatattaatatgcatataattttaatgatacagtctttatggtctttcaattcccttacttaatacttactatttctgtgtttgttcatagtctgttggctcccgtggggccagcacaatgactcttgcaggtctctgtaattcatacggagccagacactgaactccaccttcagatatcccatgcccatgtgttgagggtgacaaggaatgatttctttcatctaaccagagttcaacaaatgcgtcttgatcttcaaagaaaacacctgagagtccacaacaagggccataggatgaatgggaacttttagtacatcggagagtttaaaaagcacataggggaatataagttgaaaagggatattcggcaacaaatcagactcttgtgcatagaaaggagagatccctaagtggagaggatgtgaaaaattcagaatgtggggctttgctcatggagattgtagttcagtaggtcagggttagaagtccagaatcttctcctcaggcaattctaatgcagctaacatttgggaaccactgaggtcttggatggctcccaaatgaagaaactgaagcctaggaaagttcaatggctcatccaatgccatacggctaggtgagagggggagagtgagactaccattccattgctcttttcattaaccttaactccaccactcagcatttcactagcagagaatgttggtctgggggtaccaggaggttgaatggaggacgcttgtgctaagaagggagaactatttagaacacatgtgaaactctatttacaccaagctttaaattgaacttcccatttcccagtttcagcttccagaatgcaaccttaatcttgttcatttgcataagctttaaaataagcctttagaacaaatgtaaatggatcttcaaagaacaatattatgatgggttcagtgtaaatgactcaaaaacatatggatggcatttcttgaggatttcccagagagtcttgctgtctgtctgtatgcaagggaagtttattatcaaagcaaaactgggggttgggagaagtgtggtattcttaggatagtgtatcctaacctgcttgtggttctaatttattttcatgcctcagtgagctggactgataatatggaatggccaacatgaagcagaagtcaatctcttcgtcaggctgaatgtggctcacagaagcatctcacaccccaggtcataagacacacaacatggatctcagaactggaaagaacaagagattttcccataaagctcccctcaccatgggcatgaggaaaccaaggttcagagagggcaagtgacttgtcaaggtcacatagccagtacatggttgaactgggacatcagcctaggtatgtctaactccgaattttattttctctcaaatatatatcacctagcagctaagaaatcagcagacagtggactttagaaccaggcaggcaaacacagcttcagggtgaggttaggcagctagaacgttattgatcaacaactttgccacatcactggcacattcgttgctgggcaacgtggctcctctctgaagaggcaagaaaaagattctgaagatgatggatctgcattaagcaaaacccaataaccaggcactttcaggtcaaaaacttggtttgctgtggtttggagtttctaggtcagctgcccaggggctgtcccctgctcagcttatctgagatgaggccatcagtgaggacctcctcagagagaagagacaggaaaaccaatttaagattcccttagacagggcagatggagatatgggcttgttttctgcccaatgttagtattgtatcttatcttacagctaggttgaaattagagtagttggcaaacaaacaaacaaacaaacaaaaaaaacagcacaaagagatgacttggggatgggaggtgggtgctgctaaacaggggcaagtcatttactgccatgggcctcagtttccctatttatagaacggtgagcctggactagcttcatgttagtctatctacaggtgctggctggctataataatcacctggaatgtttgttaacctagagactctgaggccccaatttcagctattctgatttaggaggtttgacatgatactcaacaataatttcatccatgctatcagaggtatttactgcatgtctaggagatgttctgggctctgtgttaggtactgggaatataattgtgaatgcatattgaatgcaaagcactatataaggcaaatggggtatttaaatctttaaagaagaattcttgttggacgaatggcagtgtaatattacatatgtgagatttagtcagaattggatttgaatctttacttttctacttactagctgtgtgaccttatttatgcaatttacttaacttctttgatctcatctctaatatggggatatgattacggtgcctacttcataggatggttgattattacatgagataatctggctgagttgctcagcacagttcctggaacatagccaaggctcaccaatggcaaatacacacagattcctggggttttaggagcttgtaggagtgtgtgtggtatgtatatgagtgtgtgtgagacccacagcatgcatgcatgtacagtgtatacgtttctcagaagaaatttagtgatggggagactactatatttctgcttggcttcatcaggatggcctcatggaagaggtgacattagatttgggccttagcaatgggcagaattttgataagcagaaaagaagaggagcagaaaatgttccagaaagttgggactagccaaggggcagagggcccaggaaggtggagctgtgcttgggaaagtggtggacaggccattcatggaaggcttccaatggctgaagggccttgggtgccagtcaagggacaaaatggacattggtttgtcttctgaaacacacaactttttttttttttatgggtggaaagcctttgataagcatttgttgaatcaatgactgagatgttgagcaggggagcagccttttctgggaggttcacccgcaggaggtgtgctgaccagagaggatgaaagggaagctggaggcagggaggtcaggactgccatactgtcccagacatgcagaacaggctgctggactagacggggacaaggaaatggagaggtggcgcaggtgcgaaatgtatcttgatggaagcagcaccaagttctggagactgatcaggaagcaggtatggaagaagcagcagagacctcaattttcaaagtgtgtatctggaacaatacagaacagacagagccactaaatggggctgaggaaaagcactcagagcctttccaggctaagccagggctccctggcgtgtgccccatggtgctggcaatagtgtctcgtggaaactaaggacccgatgaacagtactcgtattactattctttataatgctcatgccaatgtcaatgttttgaatgctgccttccctgctagaatataggcttcatgaggcaggtactgtatttgccctgttgcctgctctgtccctgacacaataaattgtgtctgccacatagtaagtgctaaaaaaaaaaaaaaaggtgggaaaagtagctgagaactggtttactgaggaaagaagttgactcactttcagacacattaggttggaggtgatgcgaactgtcttgctggaagtgtccactgggtagttgcatattctggttagaggtccagtttcaagagggagaccctggtcaccactgggcacctccttccacgccaggtatcacctccctgtggccctttccttgagaggatctcatgggacctccttccaaatccatccctagtctcccggccacacatactggtttctcccccgaaaggctctgaatttgagctgtggtgatatctctgtgatacaggatagcctcttttgcctaaagaaaaccactctgaaattgcaggctttcaaatgaagctttgtagtacatgctatagcaattcaaaacggtggagggaggggaagaagtctgaacaattgcttagctcattaaaaacagcatttggttcacatttcaacatctgaaaaaaaaagacaaaatggaattttacaatgtggtcacctgagctaagaaagattagtgaagcaagatcaagatggaaaacaaacaaacaaacaaacaaacaaacagaaaaacaaaaaaaaaaaacaaaacccaaacaaaaccctcagataactggttgcattactgtgaatacttggtacggctacttccagtggctctttatttcccctgtaaatttgaagatactggcatgaaagccaaaacaggagatggggagataagaaaaaaggtattcaggtagtatcaggtggtctaaccactgagcttcacccccttggtgctgtaggtgagagcttagcctgcagtgtctctctggattcttttgatcattcattgcttgaaatgtgggtttccataacttcacaattcacctccaagatgtagactgcatggattcccaaggaaaaggacatctgaaagttccagaggccaggcttggtgttgggcgtttatcaatgtacaagtccctccctgccttactcctgaaaggggcacactagtggttactatgactagctggagcctgcttggcctctgtaacaactgaagctgctggccaccctgccattcctgaagggtttgtgtctctctttcctccttgtcactgtttgcttttgctttctctcctgccactccatctgctttttgttaggtttctttgtggacttctacccaccctttaaatgttggtggtccctgagggtccatagagattttcttaattttgtctacattccttattctctttcacctatccggcaattttgaaaagaaatttctatgtgccagacaccgtcctgggcatttggggatatgaacatgaatgatgggcccttgcctttaatcagcgtgtggtttattaaaggagaaactatgtaaaacaaatacaacaaagtgtgatatgtattgtgcaaggtgtcatggaagtgcagaggagagtgggggtaattccgcttgggacttcaggatcagctttcagcaggaggtggcaatacattgagactccctaattcatttctgtggccatgaccacccctgtcttctgagctccacacttgagtttcagatgacttgccagacatctctactagcatatgctgcggatacatcagactcacaattttcaaaatgaaacctcaacctccttacattgacattgccagccacccagtcacccaatctggaaacctgagcttgattctggtcccccctctccctccctcacctaaccacaccctgatctctatgatcaggtgtatctctatgaaagttctgacctgcctctttctacatgaccacgaggtctgctcaagttcaggccctcgttatctctaacctggagtattacaagtattgcaacccctttccaactctttggtcccaaaccccattgtgcttagcaagaacctgcggagctcctcacacactcacatcctgcagtccctccccttgagattctggttcaggaggaacagcctcacgtggccctgagaggagtggtttgtggaccacactgaggatagacagtgtctctctgcttttagtgtgctctgttctaattagtgctggctgcttccagggtatattctgaagcatagacatgcttctgccatcttggcttaaaaacctccagtggttctgaacatcttcacaaggcattgaagacctttcctaaaatgactggaatcgcctcagctgtgtagctaacttgttttccttccccatcaaatgagcaagttggcctcatagcatagagcttggctcttggcttagtcccaggccagcaggcctcatacctctactctgccctgacaagttgtaaccctcagtaaataacacaatcagtgtatacttacaaaggctgttgtatgaggattaaataaaatactggggatagagctctttgctcattatctagcgtagcgtaagtcctccatactgaaagctagtaccgtcgtcccatgctcttccccattatgtcctctacactccagttatcccagaccatttaccattctctgattaagtcatgcaacctcatcgccactacctgggactgtctttccttaattagaaaactcctattcatccatcaaaggcctgctcacatgttccctctctgcaaagcagtgctctctgtggtcgtggctgtgctcacagaaaaggcactgtatatccctctttcgtggtattaggaacctggtataactgagagcgcatctcccttgagttccttgagactagaaacggttttatttattttggaatctcaaacctagcaaagtgcctgtcacagagtaagcactcagcgccgtgaatgaaggaatggggtgagggaacgactgtgtgcagagagtcatgtgagaacccctgttcccctccctctgcttggcagagctgtcctttgtagaagtgattctcagtggcccttgccccttagcaacctcaggtcaactggaagactcccctccagacaggcgttgcggtctttccctatcccacagggtctagatgcggccttcccaggtgactttctgctctactctttctcagtctccatctgacccgtgcctagcatcgtggcccctgtaaagggctcttccattaataattgcctccctagtgactgatttatctgctccttgaatctgaggaggttcaccttttaaggtgaaaatggccagtcactgaaaagctgaattgtttttatgttattcccgttccagtgacttcagaggtggcccagggcccatcatttgggggcaagaagctgcctggatgctttctggccttctgggtgtgcagacaatctcactgtttcaccagccacttccttttactcccttgcccaggcttcagcggcagaagacagtgtaagccccaggaaactgtgacagcaataaaagaactaaatgttttctaggtcaccgcctgatcaagtccccacttaaacaataatcttgccattgcatctgcaaaaccccagactcaggccccaaaaggttatttcatcaataattcttgagcttgcctacggcgagaattattcccagcaggcgtttcaggccatctctaaacaggctctgtggaggcgaggcctggctccgttcaagtgcttaggcagggaccattaatattgttgaagggcaagggcggggcaggaagggagggaatcgtgtgctgtggcaggaaagaagaggcctctgcgggaagggggcaggggcaggaaggccaaggctgattcggccttggtctggcaagggaagctgcgtttcgtggtaacaaatgaggattaaaccaggccacgtgtgccatccatcgctgtgataaaagcctctctgcccaccgaaactgtgcatgggatccttttgtaatctgtaggcttcagtctatccagtgcctagctactgtgttgttgaaacgagcttctttgatttactcagtgtatttaccaagcaatttgcaagaccaagtaattccttctcagttcattgcctcgtaggtgggagagccgcttaggtcctcttatgtgacctccatccagccttcctgggccttcttagactcctgttcctatcagcttttcatctcctctccctgcagtctccaggtggcagggggttgcgaccaccttccctggagagtctgggcctctgcccagtcactcctctgagccatgaactttttgctattgtgctttccatctcccgctccaagttgacggctatggcaccttgtcctccctgctttggagtcagtgatgaattccctccgttcatttcgactgttttcgtggaggtatttatagaccgtgattgtgttcccgctgagccggatcctttctcaactatataaatttgactctctcgctttctcccgatacgacttatctgctaatccctagaacatttgttggtatttatgtcttgcttggattttctacaccttttctaaattgctccgacttgcgtggttcaagttaccccattcctcggtgctcaatcaaaagagcctcatctccccatcctcgccggtttgctcctggggacatcatctgctgagaaccagaaagatcgtgcaaggggagaggaggttaacagatggctcataattatattacaagagcatctctaaaggaaataggatcatttttcaagtgacttctttaccaaagtcttctgtttcaattcgttctccccaccccagcaaaaagtccctcttaaaaaaaaaaagtcagccattcatcttccgagaagaaaatacaaaagtccacccagtctttacaggggaaaggagacaaatattaaggggtggaggtgaggaaggtgaaagtgactgctgtgatcattttcataaccggaccctcaacatgttcaggctgcctgctgaagctaggaagtccagaatgagatttatcaactctcaaggccacggaagaccctagagattgttgtctaacctcattttctacgtgtggagaccgaatcagggctgtgtagagaaaccagtgcgcgttttgatgccactcattctgggttttcaggtctgctcatctgtttactagaaatgagtggttctggatgaagtttcctgactttactgaacttcagtttagtttcctcatctgtaaaatgcaggctgtgctacttaaatgggggctttttgtggatattgaaaataatggatggaataaataagtgccttgcacatagtaggcacagaatacacaatcattgctactgagtcacagagcagtgaagccacctgcccaaagccactttgtcaaacctggggccagaacttggggcctttatttctcagttcgggacttctactatggtacttccttctccgtagccaccccattgaacacatttctgttccttgaaggtggcatgaggatgttctcaactatggcactctggttgtaaatatgtttgatgctcctacgtgtgggtgctcgaagcccacagtgaagcttcaagtgaggttagccagagaggaacactcttaccctctttagaaacagaagggactggagaggtttggctgagagacttaagaatgtagtatgaacttatcagtgaatgtagcagctaggcttttcttagggcaactgggctgggccagggtcactagcctgagctgtggctagtggtaaagcttctacagaactgtttagtgggaaagaatcaacctgtgttgccaatcattctgctgtgtgatttacaaatgccatctaatttagtggttccccagcttctggttccctgacaccaggaagtaggtataatgtttattattttataggtaaggaagctgagacctagctatatcacatggattgtccaagctaacaaatggtagtgcaaacgttggaactcaggtcctcagtgactgatgctcatatattctttccattttcatgagtactaataaaacacatgatagttatcactttagggatggctttgatttgcagggcacctctccctaaggtgctaaacacatttatagatttttataaatccaattaagtttattatcttaatatgatcttgtctaatttatccatatggatgtgtacacatgtgatttggacaggaaaatcaatttaaatgatttggaccaaatgtattttatcttatgtcaatgctgtggaatttaccagagaattgatgaaacttcatgtcaacagtatagacacactgtcggaatgcatcctgtagcgccacaggactcaggctggatgaacttccccctcagctcattcaatccactcctctaggtctaaaaggaagcaagctgtcttattctgaaaggtcttcaaggacaaccttcctggatgcaccatctccttgtctcacaattcttcacagccagaaagttcttatgcctaagcagaatgtctattgctttgagcgaaccacttttccttctgttccattcttgctggctaaggagaacagctgggaaggtttcaatatctctgttatgaacttgaaagctgttttaaaaacactgctcaagtttctcttctgctagcccaatacacttgattcttttagcattcgtcacagggagagatgattttctacacatccagccatttgttaagagagttacgatgattttggaatgtgagatcttaggggggcaagagtgaccactggttaaaaggctgcacaagtaatcatcgcaatatctgctacaagtggatcctcactaaatattctttttgaggaaaaaaaaaaagaaaatagtgagaactattgctagatcctggtgtctatctgaatatgggaagggaaaaccatagaggagaaaaagagtcaaatgaaagaggctaaatagggaaaaaagatagtccataccccaaaatttgtatttctctgttagccaaggtagtagaatattatcataaaagtgtggagtttatttcttgtttatttttatatttttagagatggggttttgctatgttgaccaggctgatctcaaactcctggcctcaagcgatcctcccatcttgacctcccaaagtgctgggattacaggcatgagccaccatgccaagcttagaatgtagagtttagagtaagaaagaactggcttcaaattccagctctgccttggtgtgtgacttcaactgagttgcttcatctccttgtgtgtcagctttttctttgcaaaataggaacaatgatgatacctgtccctgagttatgaagacggggtaagctaatgtattgaaaggatttcccaggctcagcgtgggttggttgggggggtttcttgaagcattgtagctcccattattctcttaaaccaatagttgtctatgggtcttgggttttgaaactatcattaggaacttcctcacttttggattttgcagattcctttcctgagagttgaaatgatggctttaaaaaatgtcaggattagttgggcatttatgagttcaagggatcctagatgctaactggatgatgagttaattatgtagctatggaattaacattatcattacagtgctaataataataattgcataatagcattattcttacagcggaataagaccactgagtgttgttcttgaaaactgatgcagaattagagaatacttaactctctcaagtttgggtacaatttctaagaatctatagtttagtgactcattggcactctaatgactactattccccccccacccactgcctcccaagattcacatgtgaaagaatgcaaattcaattcctcctgacaaagaaatctaaattcatggattttcccagctgtacccttgagcgagaactttcccaaagtgaagagcatggaaaaaaacaattggttttgcatgtttccttgggaatttcaggaggaaatggagctggaaaggtggtgttggaggcacggaaatgttgatggagaaaagccctcttctttgtataaaacatgtgccctttgttgaaggaagtggtagcaggctgccatgaacccagttttctgagctcttccagaatctcttgtgataatattgctttgttttagctgagaaaccttggggttttatgtgacccatgggtacaaagatcatgatggagacataagccctccacaaatattctaccttcctcaagtcaccatttagggatatggggtgaatgaactcgaggaccagcactcgtccaataaatcctgctctaggaaagacaggagaaacaaataggctaaaagttccccagggcatgaaatcttggtagatgtttgtttgcccgctccttacaccagaggaggcctcaccactcaaagcaacctggctcagagcagacagagcatctggagctgcctcagaggggctccatggcttcctctccaatccacagccagccaggccttccagaaccagacaggagggtgcttcagttactccaaggagccactttgttccatcctgcactactgggatgtagacggcccccttccttagattacttaggaaaaaacaacaagcaaatatcacaattgaaaaagaggcttttggattgcatggtgattttttaaaataaaatgaaataaaagacaattgtgggggacaagagtcttctctccagctctccagatggaatgtctgtgttgattcattgactcaataacaactcaagtgttctattttcttggacagtggagatctagttcagattatattaagatctagggaagggtgacaaatggagtatcaccctataaagcagaggactgagaacctgagcattggatctgagctcctgcctcccatccccagttctccgtatgatgctgggtaaatctcatcaccacctgtctccttacctagaaaatgggaatcatcacatctgttccctcatgaggctccatgcatcttcattacatgcttagagatgattagatagaagggtccacagatcgtattagtcttaactataatggtcttaataaatatgtatgctgcccaagaagggagtgtatggtgttggaatggtttatgtgtcttccttttcagactgggactgggaaatgaggggaatagcctactttgtcactatttatcattcttagttaacaatgtaagatacatgatggctgctaaacaatttggtggcagaacctcataaatgaagtctgttttccctggaaactgcataaccatttgaattaatttaatttgaaatatcaaattaaattaaactgtagaataatccccaagggagagcatatttcatttgcaatgtcttttgatagagtagtccctgccaaaagttttgctttgcatctggctacagatctaaatttattgcattagctttgagaagacttttaatagaaagtgagattaaaagaaaacttgatggaaaataaagatgttcactgctgaaacagcattcctcagaacgtacctctctaactttacactctctatatgtctgtctctggtcttcaattcagaccgtgtaactaggctggatgcctggttgaagggctttcttttgataatgctaattaacatgcacagaaaatatcagaacaaaatgggcagagtctacttggtttaaggcctacaaactgcatgtctttgctagataccgctgaaggggatcgtctgcgaagaaagaatagagatacgagataaattaaagggatcatttttaaagtcaccagggagttcgtgcgcactcagtggtgtcaggtggctgtgttgtcttctttctgagttgtcttctctcttctccttcttaataatctcccgtctaagtgcaggtcttgattaaggctttgggtctacaggttggaaggatagaagctgatggtgaatccaacagtttcctaaaatataggtcaccacaaatcaccacttaggaaatgactggtctctttctccatggccagacattgatgaaaattgtactgagcagctgcctgaaagttgatgcagtgggaataatttatttcttcttcctggtgagcaaatacacagcaagagaggcggatgtgaagaaaagctgtttgcttgacacaaacagggctggccctttaagaaaggtttgtatgagtttaaattgggcccaaggaacccagataagagtatcttaatcaaataaaaaaagcattaggctttaatctccagcactttagtaacctcctagtttgttttaaatcttgattggaagaattatcctgacaagaaaattagtagtaagtcaataagtctgtggcccaaaggtagggcattaagtaaccagagggaaaaaaatgtattcccatccgaggcccttgcctgccctcctgtagccacaaacatagccctgcagacagttccctcttgatcccttgcaccaggctgggtggagaagttcattataattttagccatgaagtcctgaagtgcaggtaatcgtgtttaaaaagatagggaacatgacaggaaaagaacccagcttcatgaagaaattctaattttcagcagtcatgggtggaaaatcaatactactctgatgcgaaatgagaaccggactggataaagccacctcttcccattgctctctttaaaaaagacacacaccagaaagtaaaaaaacaaaacaacaacaacaaaagaaaaaacagaaaaaaacaataggcctacaataggaaaggtctgcgtgctgacactctcaacttccctgagtgcctgtacacccccgcccccaattcttgttgccagagagccctcccctggcagcaatctaattccagctctccttgtcagaatgtgtcttcctgccagcttcaagcaactctttccatgccccttctttgcactttttccaccccctcaccactaccctgaatgcgtgctcgccatctgccattcaggcagagagagagagagagagagagagagagagagggagagagggagagagaaaaaacagagagagagagagagagagaagactgagctgagcacccagcacctaattttggaaactcactcgtaatttcaatcacatctaggtgttatcttgatataagaacaggtatcattaattgactagcaatggaatgggagctcttttatactttatgatccattgagagtggcagctttagacatattggaagatttctgttttaatcaccgattatgtatttggccaataaagctcatattgttaacattaatatatacatatttataactcgatgaagccagacataattaagtagaaatgttcgaattaacaatgatgataatcattcaaaataagattcccatgatgtcttccagcagacgactccacccccaacactgccgtgagaattgtatgtgctgagatgttgttcttctcacccttcaaaatgggctgtcaaatttaacaaatggtaaatagaataataatgaatgtcttcattgtgttgtattgaatgtcatctgtattctaaaacctctggtgttggaggaattcttgcagagaaaggggcttccaggagggcttcagtacaaggcccatgccagtatggcaggtcccttagaaggcatgtcttctggatgatcaggccaacagttgaccaggaccaggacagatgtattgttggtctaggcccctggaatgccagtggcgctatctcacatccctggaagagagtggagccatctgctcatcttggcttcagtagttacatgcaacaggttccccaaggaggaggcatgcagctctgaagtcagcagggagacaggggagaagtaaagcctttcttttgggtcaagcagacatctgctctccattccacctccactcccaatgtgccagcacagctttctccttcctttgctttgagcagtgtatactctgaattacgtttgcagtatatccctgcgtccctgccaaattcactggtggggaaaattggtggtattgtgggtaagctgacttgggacagaagtccatttctcgaaggcaccacctgcactcaagacactggtttctttgagtgcctggccagacatatccaccaagactcaggggtctgtcttccaacaaatgcggctccaattctcacatttttatatgccatgttacacacatcatttctgaacctctcagaagcccatgcatttctgagcattggcaatcaagcataaagttctggggcaagctgtgaaatctctgaaatgaaaatcaattccatctccatttcatggagactaatgtggcatttacaacataaacaatcacttctgttagggaggaaaattaaaagctgtgctacataaaggcacaatgtttaaagttctggtggaaatgagcacttggctttgagatgattacaaagggaattggaaaaagaaaataaaaaaaaaaagaaaagagaagaaaagaaaaagccagccccaacaattcagaagtgcagaggtttcataatacaaatttgctatggctgacaccactggcctcagctcagacctctgggagaaaaagaaaatctttgggcatttcctaagcaatgtgggaaaggtatttcaagggcccaggaaagtcacatctatttccttttttgatagtgttaggagacacagacaatttcctatgggaaagggcttgagacctacaggataggcagggggcccagcagttttagggtcccctcaaagtataggtcttttgaatccttgatctggtgacatttttcattatatcaaccttcatttctgtgttgttataatagggctcatgagtgtctatgtgcagaataccaagatttacagattgaaataaaaattaaaggcaagaaaaaaaaagagtctactgttcttttaaaagcctggaaattagctcatattcaccactagctaactaaggaaatctagtcaaggatctccacctctgaagactcagtttccccatctgtacattgagatactagaccatgtgatactagccccaaagggagctgtctctaaaattttgtcattctcttattctgtatgggatggcaaccaaccattcaattggtatcatttgcaagggtggtggggaaaagcataagttgttgccaatcgggaggtgctcatttgcataatgactgattccctaattagccagaaagacttccagtgtcgccatgtaggagcacaccagagttcctgctgtgacgttacttagttgagctctccgatttggctattaagactctcaaagtactagccagccactaaatgacttttcgataaagctgcccaggcaattaagagcattagcataaaggaatctttctcaattagctatttttagagtgggctggaaatgctatcttgcagctttttagaaatttttataacagtattatgtttgttgtattaccagtgtcacatgtgtatttttcattctatttttgttctgcatcaagtaatttgtagtagtactattttgaggggtagttatttgccaaccatttgaagagaagtcaaatgaatttctgataaaggcagccctcgttaattccaatctgagcatgggacagcccagggtatggcttgtatacctatgtcagccagtcatctcatcagacatcttgatttgccttgatcaaagaagcaatttgtgagacattccctcccctctccccaccaaagtgctaatcaccttttcaaggtagaagatagatgggaaacaccgcacaaattgcttgccattgccccaaaatgctaatcacttacgaacatctaaattatgactggagaccttgcatgataaggtaaggaaacagtgtcagtgcatacagaactattatttaccagtgtcaaaaataactatcgcatttgcatagctgtggcgctagatgacaatttctccctcaaaactgcttccgtagcagaaaaagctttgaccgatatgaagtgtggcatactgttatttttttaacccttacaaaatggaatgagacctcttggaattagatgttagagcactgatttgggaaacaggagctacccaagaaaaacaatttaaaatgctttctttgattatatttcctttgggtgcattggttgctgtcttgtgtaagccaacggtctccagagtgggtcatgtacaccccagggagtcatttgacccttctgcatacaggaagaaactattttatttcttaatgctataatgtctactttgtgggtatttttgttgtatcgtttgagacgaagtcttgctctgtcacccaggctggagtgcagcggctcatggtgcgatctcggcttgctgcaacctccacctcctaggttcaaatgattctcctgcctcagcctccggagtagctgggattacaggcacccgccaccatgcctggctaatctttgtatttttagttgagatagggtttcaccatattggccaggttggtctcgaactcctgaccttgtgatctgcctgccttagcctcccaaagtgctgggattacaggcataagccactgtacccggccatgggtatgttttttaatgcatgtcatatattagaaccagagcacgtgtatagaatttacagagaaatgcatatattctggaggtatgctcatagtttttactgatggatgttagtgataaaggaaaaatctgtggagatcattagacaacacgtagcatcgtgctggccaggaagatggcctgcttctaaggagaagtttctagagggacaagctcattagctgtagctacaattatattgttagagaaggtatttccatgacataaagaagcctgcttatgagcactagacataagtatatctaacatcttgcacccatttctattcagacaataatgaaatttactttcctacagttataaatatagtctctcaaagtgaagaatcacagattgaattctttttggggtaggaaaatgcatctagaataagagacacgtcagagaggaagggccaagatgaagaagtcgcaggaaataaaactagtttaacaagcctgagtacctaggcttcctatattaacacagacatcccatgccaaccccagcgcaaccccaggactccctacacagacagaaagacctctgagattgcccaggcaactggttttgatctagcacagttttcttcttatccccactggccctgtcctcttgtctctcattcattcaatcacaaatatttattgggtgtttaggatgtgccagacatagttctggcaatcttgagatttttctttccttcctcctgtctgtctgggggtcacccataggtctccacgcaggaatttcgagaggctgcaaactcatgattcctatttattgttcattgctgccctactgagatacctagatcatcaaatatgtttcaaacagagctctagcagtgggagtagagatgagaactcatagagagaggagccttctatgctcagcctaactgctctctcacttcagaatgtttcacctagttggtcttttcagttcgcatttctgggaacatcaacaaataccccattcatttctgagaagctgcttcatggtcaatcttgagcttattgctggagagatccaaagaaacaccgaagaagagtcagtccctgttctcattgagcttgcacaagagttggaggaattaaatacacacctaagactatacagaagcaccatcacagagcaggacatgggtaagtgggagagctctgttcaggatctattcaggatctgcaggagttgagaggctgttgtgatatactggaagcagtctagaccttgaagtcagaccattatgattccagtctcagctccatcatttatcagctatgtggccttgggcaaaccacttctctctctgagtctcagtttgcttatcaacagaatgggaataataatacctattgataggattgttttaaggattctgtgaaacagccgatgtggaaaaacactttataggctggaaagttgcaatgcacattttaggaattaccattaatggagggtaatctctctggtctggagtggttagagaaggctttattctgttatccactgacaccctccaggacagataccgttaaacataaatgaaagagggaagatgaagcccagttgctctatgcattctttactgctggaccatggaggatatatggaatgggtgtggaggtggctcacttcctcctgcctgcttcttctgaagaatctactagggcttggaatacctgtcttgatcattctgagaagaatggaaacactgggaagatatggtgttggcagggactcgggaccctgcaagacccagtgggaaaggaaaggtggtcaggttgtcaggcccctgcactctgcccaggcaaaggtattcacaaacctccctgggggctcaccagaggggactgtgatgagttggcttctcaggagtttcctactcgctggggcctgtgaggcacagcaacttgcctgcttgtccccagcaaagggcagtgtccagagtccattcttcctgcctcatcactgaggaggagcaagacaaccccagtcccagccctgctcctttctctttcaaggcatggttaacagttgacagtgcaatgtaaatgctgggaagtgtcaagattagtaaacaggaagaggatttggaagctaaatgcatgcctaactcaaaggacagattatatggttacactgttattactttgagacatagttactctttcttctaaggaatcttgtagaaatgtgattatggtgtagtttgtgtatatcaccagatcttatgaagtagaccagtgggccccactcagcccctgggggctagagaagagttatgagctgcactagtttgtcttggttttatcttcattcctatgaactctcttgggaagaagtctccctaggaagctgctccccgctttcaatctcattttctgatatctagttgtgaatttcctataattaaatatagtttgggctgggtgaggtggctcaagcctgtaatcccaacactttgggaggccgaggggggcagatcacctgaggtcaggagttgaagactagcctggccaacatggtgaaaccctatctctactaaaaatacaaaagttagctggggatggtggtgtgcaactggctaccaccagttgcatgttgaggcatgagaatcacggaaccctggaggcagaggttgcagtgagctgaggtcacaacattgcactccagcttgggtgacagagtgagactgtcataaataaataaataaataaataaacaaacaaacaaataaataaagtctggtctcctggttgttcaccttggcttactcatctttccttttgcagatgccctggtgagtgctgttctgaggcaagaccaattgactacaaaaccaggtcaggttaggtacccaaggcagatgtgcaacatttattagaactagtgccaactgagacaaaaattcctagctgttctttaaaatgcattcttctactcttctttagctactgttaaatattagtagaaaataagactgctcagaaaaggcacttcattccccagcctcccttgccgctatgtgatcaagtcttgggcaatgggaggtgagcagaagggctgtgtaaaacttccagatgaagcctttcccatctgtttctcacctccccgttgaccagaatctggtcacagcagtgggagctggagcaacccttgtggactcagaaatggaaatcaggctcttctgtgtacctcctgatgctagtgacagagcaataaggtcttttctggtttcaatgttgttaagttgagcctttgtcacatggccctcaatggagacctttgctctggagatcttcagtggaatacctgagagcgtagactcatgtcacagtctctttcgtcaacctgcttggcaggctatctgtggcttaatgccaagtggggtctcgagcaaaactctattgaatttgggaccatcttttgcaatagcgtctgcaactcacgattgaccccaaatttctcctttgtttcatttccctttggttgtggctgacagctgtggggctgcactctcagaggccacccatcctcagggatcctgggattcaactttgagagcataactaggtaggtagagaggggctatgcccaggagtattgccccaacttccaaacacattcctatcctcgtctggcattgagagaagagtgcaggactgggtttgagagcagattctggctctgttgtcagcaagctgtgtgatcttgaacaactcctcttctccctgagcaaaatgagggggctagatgagacgatttctggaacatctcccaatgtcggcgttctgtgatgtgacaattccatgaccagcctcatggctgaggtgccactttcgatacataaaacaagagtccacatctgtgccaagggctgggcagggcagtgctcctcacttcctccatctgctcagcacccaacagtgctctgatgcagggggagaagagcagggagagggcatgaggatgcagtgggtgggaggtgttaaaaaggggactgatggtggggtccttcttttgagaattctagtctctctggggccacatgacacccgaacacacagaatctgtgggaacaagttacccaagaaatgtgcccaggctgagggaccaaggcccagcgagagtaggtggtaggtaggcaatggccagtggggccagcgcgggtttgaaatctatcttccccatacttgctgcatgaccttcaatgagttcccacgcttttgagcctttgttttctcacttgtgaaatggggacaatagaaacacccctctcaaacgtagggaaagcttgtccacaaagcacttgacacacagtaggcactgagtaaattctagcttccctggtgtcccctctcctttcctactttgaaaacagcagtctgtctcattaagtatcctacttagttttcagttgacattcccactctcttaccttctgccccctgaatttttcctctcttttcctgtatcttttttcccccacaactctgcattcccctccccatccacagcatagttctcccatcattccttctttgtagagggcaaggaaaggtgggttatacagatgcccagtgatatttcagaagctctaattaagtggaagattatgcatgccatttgagttttaaaagacattcagatcagaatgaatgaaatgctaacttttcccctgtctaacccactcacccacataccctggggcaaaatgaaacataactcagtttttcctggaaaggcatcagacagcaggtcgctctggtcaatgggcccacggcagcacccactgtcttggcaaatgtccattctgtcaggcgccctgcctcttgccacctctttcttagctagatacagatggaaaaaaaaaatgacagcattgggctgacacctgcatcgaatggaagctacacatttctgtcctagagataggtggcagtgtggattcagggctgtgtggttcaagatcaacttcgcagagaaacaccgtttccagaagcagtgaggatctttcatcatatgcgcctctgatgctcaacaaccttctttgctgcacccgccgctgcctcatgaggttcctggcagctcttactgcgccagtaacaactggatctcaatccccaaaacaattccctgctcattctatgagttacagtttagttaatctttggttagcacatgcacacgtgggcacgtgcaaactctctcagtgtaggctctgaatgctgcttttatgttattgcacacatgagtggaacatactatccagcttcttagggcctgtgctgtaagcctccggggccatataaacgcggctattttcacagtccaacttcagaactcagaggggcagctctcctttggactaggcctttggcaggagtcctctactctcggcctggatcctcttcaatgaaccacctatgtgtcacttatgtcaatatctcagctctggtttttcaagtgcaagggttatttgctatattttggaaacttttgagggtacaaatagtatacaggtcaaaaagtaaaaggtatcagcttagagaatacaaagcaggcaatcatgacattcctagagatggacaggagaccatttactggagatcagagagtaacaaagagtttctggaatcttcaagccatctatggttgcagaatggtaactgagaagcccctgatggtcaccaaataccctggcccaactataccccgtggctctgccagttctttccattgactaaatatcagtttcctcatctgtaaaatacagaccatgacaatgagcaaccttcttaggtggaaataagatgaatcttgtcaaaattgtcttcaagcttatctacacatgagagtcaaaccctcaccccaacaccacaaagctaagcctctgaggtgtgtgtgcggggagaaatctaaaacgaaaccagcaacccactgccatgcctgctcaaccaaccctcccagagcatacggcttttactcttccttattacaggtgttcataatgctttatctcaacgggtctgtgtctcctgcatttagctgtggaataaacaatgttctgataattgctgggtcaccattatttactactacagttatttttatttaagaaagcccctttccttcgggctccagtaagaaggcaatactataattttcttcactgtctccctttaatgaggtcgaaggccaggcaaagggagtcaggcagttttcggggaagcaaccccgcaacaaagctgacctcagccaggagagtccaacataactcactcctcaggcggattaattgttcctggctcctgcagcctagctgaaaagtgaagaaatgatgacaccaggcactctaactaggttcaagctcaccatttctttttctagttaaatccttccccccaactcccaatttgctacctgggcaaggaagcccctcccttccccccataatcaagtgctctacaatttccactgtaactttatgttacagaatccatcatcagctacctgagcttgggcatgctgggagaatgatcttagctgagcaaattcacctccttgctttgccgtttacttccaaattcccataactcactgcttttgccagccctcctgggatggtatctagtatcgtttcatcgctaatgttgtgagtgagctagaacaatcatctcttaggatgcccacactaactggagtctctacctctctcctcctcccctctcttctccttgtcttcctggccctcagttggctgagaacagtaggagcccataacagacagcatgtcatccattcctgacagccttggtgctataatatggtcctgccaaacccattacagtaatgacagtgttgcagaattagaacactcactcctacgcggagaagaaaaaacttggggagagaggggtagagttagaatcttctgctattttgctttttctctcttttctcctccctaggtatggcattgtcccttttctttctcttttattctattaaaaaggtaagtgagcacacaaccgcgtgttgctaactcggcaaacaggtttccagggcaggtggtggtatcttctgggtcttggggaaccatccaaaagagattattgtgcctcatggtggcgccagtagtatcattccattaccatttcctcaaatggggagtgtacacacggaagttcttttctggggctttgataatctcaataggcacttacagaattgacttttctgccttggcctgggggaggcgggtgttgtaaaacttaatgatcatctttctgactggggatcataaagtgctgttgataattgtgatagttaaagtgatttgcttacagtaattagttcctagggctcccttgtggaggtaagagaaagagattgctctgtcttgcataggggcaaagtgaggcacagagggctggggtctattacaaagagctagtcatgtttgaccacaagagcctggtctaggcacatagattagagactctgcattgaggagggggtacttggtggctctttgtgggtaagagggcattcaacatgagaggtacagggctgatttaatgtgacaaagagatatgcctggcccagagggccccagagctccttctgagtgtgaaagcatatcagtgcaaagactgggagacaaaaggaccagtagtttacactaatacacaagaagagagcaagcctgggaatcagcctccaacccagtgcttttcctacctgacatcccgcccaagggtcagaggagctcttggaaaggcggagggtgttttctaccaaatctgacaggagggagctggtagcatgcttgggacaagaggcagaactcatgtcagtggtgatcaagctatagaaacctgagggagacccccaccctgagctcttgcctcagttgtggctgagtcagcttctgggacagacactcccagggactcctaaagctgggaatgtagacaactaattccagggcagcagggaacagcggaaagagccctgagtgttagttttgaaccctggccctgttgcttgttggctgtgtataatgatatacactgtgtataacgacatacactgtatagaccactgtagggaccaaatatgtgaagcaccttgcccagggttcaggtcattgtagtgctgatacatgttagtttccttccttttactcttttaaggaatcccctcagacattaaatcagtcagcggatatctattgagaatgtacgtatgttcagcctgatgctagagacggctgaaaggggaaacttgccataagaacccagcaaaataatggacattgaaacactgcatagaattcgctgcaagaatttgttaatgctatgtggctgacaatttgattggtgagataaggttcaggcataagaaattgtcagaagccagtgcaaggcaagagataatcaaatgctaaattgtctggtaggaatgacaatttctctaatgtccccatcagctaccatagggtgaagtccaaataatcttcatgacatccaaagccctgtgttctgcttctgaaatgtctctccatcctcaaaattttatgattcctcttatcagccatttctggcaactgtcattcattatttcatccatctgtccatccatctgtctatccatctatccatccatccatccatccatccatccatccatccaatccatccatccatccatccatccatccatccatccatccatccatccatccattcaatctgtccatctgtccatccatacatgcatccacccatccatccatccattcatccatccatccatccatccatccaatctgtccatctgtccatccatactgcatccatccatccacttatcccacaaatactgagtgctcattgtatgcaggcactgcatgtcccaggtctggaaatgcctatgaatcagtcaggcaggccaaggatcttatgaacttggtttatgagatccttggtttagtgtgtgttgaagagacagacaataaaaagactagacatacacaagacagattccaacagtcagaagtgcaaggaagaaagaaaaacaggggcatgagctagacagggactggaggtgggttggaggactactttggatggggtagtcaggatggactcttggaggatgtgacctttgggctaagacctgcacaggagagcccatccctcaaaatgagaaagagagttccaagcagctggaagagcaagtgcaaaggtcctaaggtgagaatgacccaggtgccttcaggaatagaaggaaggtcactgtggctaagcttgatggtcctggggaaaggaggtatggcaggatgtctgagcagtcggcggagaccagacatagagctccatggagcacgagagccatggcaagaaggcgatgttgcttcccacatgcgtgggagccggtgaagtgttgtaagcagagaagtaacatgatctgctttgtgtctcaacatctttttacatgatcacgacttgcagtttcccaaatacacatttccgcagcacatttccatgcctctgcataggctgtcccctggggtctcctttccgcatcttgtttacctgtcagactcctcggggcctttgagctctaagtcaggtatctcttcctctgtgaggcttcccctcttcccacaggtcccatctctgccagtcactgctttcccttcctcctacgctttcaacacatctctaatatggcacacggtgtaatacattgccattacctgcttatgtgtcctccctagcgagtagcctgcaacatggtaggggcttaatagatttgataagggccggtagtcagggtaggctctgtggaagcaaatcttgaaggatggatagaattttggtgataaagagaggccagagtctcacaaatcctgcaatatctgtccaagtcaacatgagacattattggatagatattgccatcaagaagaggggcccactccccgtgaaaaccgtgcactcctgtcttctctctaacagttaatgagaacgataggtattgatttgcatatgatattcatgcattttgcatattttcatttaccactgaatgcatggacagagttctcaatcctgtctttcaagccttctttccttcatttagcaacttttaattaaatgatttctgaatatcctgcacaatgctaggccctgtgaaggacaagcaagcagacatttgtccttggtgagctcacatcttatagcttccaggggcaaggtggagggtgcagtggtttccagctggggttctggaatcagacgacgcagatatgggtctgaatattggccctgatgaggtgtagaatcttgtgcaacctgctcaatctctctgagtcttgatttcctcatttataagataaaggtaataacacatacccaggggggttggcttggcggagtgttgggcacatagctagagctctgtggatattagctgttgattatagttgtttttcccagatccctgtatgggcggatgtgcagatcccattaaaatatcctggttgggctctgggtaggtgtgtgaagcctcttttctcccgcaattccaagccttctgagtccagctaaactgcagttcaacttagaacaggtactgagcagtccagtgggaagcctgagttgggggggaatttgggggagcctccctgcttcctgcttgtcaagggcccacctccccttgcttcttcagttacaagcagaatctacccgttcacatcctttctcttgtcttgccttaaacatgcctgagagagatcataaattgattttcaccctgacctatagacacccgcaaaagtcttctggttggtccccaagacttctgccccatccctgcccgtcagtcactgttcctgtcactacagtcgcagcgacactgggggtcagtgagtgggttgagagagctcagacaggatgtatggtgtgattcatttgcaccaggggattctgaatagataataattgtctgcaaatggcaattaacagaatctttttaaaaatgccttgatggttgtaaaacggaaggcgaagcacatcgtgcctcttgttgcaagtaattacggaggcggcctgttatgcacaggttttgagtgacctgatatttccactcagacactctgcacagagacactccctcaactccagtctgtgaccctcagacctcatcctcaaagatggcatttgaagaagactcactttgacttcttcctgaagccctttccttggcttcatacggagccccagagcagggaagggaactgaaaatcagcactcattgaagatggaaggggcagaaagaggaaggagcatttacttatttattttcttttgagacagaatctcactctgtcacccaggctggagtggagtggtgcgatctcggctcactgcaaactccacctcccaggttcaagtgattttcctgcctcagcctcccgagtagctgggattacaggtgcttgccaccaggcctggctaatttttgcatttttagtagagatggagttttgccatgttgaccgggctgggattgaactcctgacctcagggtgatccgcttgccttggcatcccaaagtcctgggattacaggcatgagccacttcctctggccagaacgatcatttattaaagagtgttgtataccaagtcttgtgttagctgcttttacaaccattgtctcagtgcgtccctaaatagcctggcaaggaagggaattttattcccttactgtttttttttttaaacagatgaggaaaccgaggcttagagtggttaaatgacctgcttgagtccagttaacagacatgaggtttgaactttgaaatacctgcttacagagcccatattcctttccactctacaatgctccctgcactgtgccctgcctggaatctccttcatggtatttaaagctgttattaattatccatttatctgataatttctttgcatcttttttggctttgctgtacagattggtgcaaaaataatcacaatttttgccattaaaagtaacagcaaaacctgcaattacttttgcaccaaccgaaatagttttaccagggcagggagacactgtctttcacattcagtgctgtattaccagtgctcctcctgatctctatccatgggcagttaataaatatttgctgaatgaatgactggcttctactggtgataatgaatcattggaagtgaccaatacaagattatctaatgatcaaccaacatctttattaaaaaaacgttttcatgtgaagccacagatttggcactggctaatccaggtaggcatgaatggtatcttgcagacatctaccctgaaatagagacctgaagttcatctctgcaattcctttgttgacaggctgagcatgcagcaatagaagacgacgtcctcttgccttggctagatcctaatgccctcgaatgcagtccagctttcctaaatgcctcctctcctcctgctttctgtctgaggtagaggagaggaggcactgtcgggaaaccatgacctttccacctgtcagagctctaaagcactaagaggtgccagctcattctcagggcagaagaaccagtgtagtctctcactaatgtcttagctctggtctgttctagattcctcaacctgagcaggttcatatggttttgctgaattctccaagtgttagttgggagggaggatgcactacaaatcagaaagaacagtgctaagatttggataggggaattgaggaagaatgtcaatattttttgggtcaatgtttgtaagaccagactcttaaattcaaggcagctaagaccggttcagggacagagaacagcaagtgacaggcatgcaggtggaatgccaggctcagcggcaccacgtggtgcggggatggcttataatttgagggagacgtttgggaggaggatgcttcagccgcttggcttctaacagcttttgacaactctgctattctgatgacctgaaatggcatgtgtgtgacatgtgtgtttcacctccggagtcagtcaatgtggctcacagagtgggaagggcagatgagcagaatcaacgtgggcaggaaagagcaaaggcaagtgacaagttgctaactcatgtttgtcaaaaagcatccctctcctggtactcatgcccaccccctaactgcctcagccttgaaagctctggagaggccacaggccagcagggaagtcactgcagcctctgggggtgccatcgtggtgccttctgcttcctcctgccctgaggagtttcttcctctgattccttggttttgagcctttgcccctaatgccagcaccatacctactgcatctggatcttcataatttggccagaaacctgcttggccaacaatctccccagtgattcttacggacatcaggactgaggtcctggggttctgtcatgtggactaaggtaggggtgagcaagctatggaaacatttagtgacatcagtgatcttgtgaaagccactaaaggtatcatggttctccaaagagttcctaaaggaaaagactgttgttgaccaaagccattagctcctaaaatactgggaatgagggaatcttcaaaatcactgcacattaatccattgattttgtaggtctgtgatgattgattttttgtgtcaactttgctgggacatggtgcccagatgttttgtcaaacattctggatgtttctgtgaaggtgtttcaggatgaggttaacactcttgaatcaggggactgagtgaagtcaatacagtgtgggtcggctttgtcccatcagttcagggccagagtagaacaaaaggctggcctcacccgagcaagaaggaactctccagcagacgacctcttgacttgaattgcaatgtggactccttcctgggtctcaggtctgacagccaaccctgcagattttggacttaccagtctccatcgttgtgtgagccagtcccttaaaataaatctgtctttctctatatatcgcttcctgttggttctgtttctctggagaatcctgactaattcaaagccaaagagtgctagagctgggtctagatcctagatcacagagatgtgggaataatgatctccttacagggagcacactagcttctgccataggaagaacatcaagctgtatgtatgtgtgtgtgtgtgtgtttgtgtgtgtgttttcctgtgagctccttggaggctggggcccacatatattatttatctctattattgcagccccaaatactgaatctggcagatagtgtttagtgagtgatgcatagatgaaaagtaaaaacagaatgtgattccaaattatttgaatacttctgggacttttaaaagtgcaaacagcagaacacaccccagggaggtgaggaggttgtgcacttgtccactcttaactcttttttactattgaatatcttatcaaataggaacaaagccagggacagggtaagagtctccggctggagaaaaaagtgatggggtccctggggtaaagtgagtgaacgccaagggctgaaggaaaggagggaggagaaatacctctttgtggctgccactctgttggatacttgcatgtaggagcttgtatttaatcttcatgtcaacataaataagtagagagtaaagctttttttttttttttttttaaataaatgaattgggataggaagtagagaagagggttaaggaaaagggctctaaaacctaactctaaccctgcaggaaaataggccctaggaagaaacccctcattgccgaagaagggggaaagaactccgagtccactgtggaggccacctctgtaccctctagtaggtgcctagagcttgcacactggttcccccgtggcaggagagtggggcctccttggcctttgactttgttctcagataaacaaacaaagagctatgggtgagatctggtttgactttaatggaattttgctttggtcatccacgctctgggctacctggacccaggacagtgtgcatgccttcacccaggcctggagcagcttgagcgtgcagtatgcaaacggtggggctgagcgtgggtttggcctgcacgctctgcacccaaacgctgcatttacatgagctgtgccttccccagggcagaggagaaaaggggctctcatcaagttctctcaggtccagctgaaaaaaactctcctttggacaactaagcccatgggctgggttggtttctccagggcagggctctcttggagacagagacgctgacccatcttctgaaccaattggatctgcatcctaaatggcaaccaagctgacagcctggatcctgctgagcccagcttcatattccctcaagcttctatttttaaagttgctgctcctgctcctgtctgctctgtaacaagtcttggacattgcctataagctgctccaccccacagcactccaggatgaacccctgctgtacctgagagctcctagatgcagtctgtcttaagaaaataataacagacttccctaatatgcaactggtaaccagttgtctgctaggctttagttttcccgagcagctggggcaaatacccaacaaataccgaactccccaggtcccagaacagtttccccttcttagacttcattgcctttcacctcccagtttatctgtaaaagaatatgccagccatgggaggcaacatgaggagctgtgtgccagatatgctcacttaaggagttgatcgatttaaaaaattcaggtagaggcattggaagctggttcctgacagcaaaaagaaattctccccagtcccactgagttaaacaccaggctgcatatttttcctgccaggatggacacttccaataaagcaaattttgcggaggagatgcaggctggtaactccttgaagggggtgcccatcttgactccctgtgagataaatataagtcccaggacagtgttactctcctttcatccccgtgacgacaggcttggccttatttgtgaccctcctttccagctcccccagttcatctttctaaatgagtctgaacagcccagttcagggcctgcctgactcactcgctgctgggtctttagggcctattagcattcccggtgcatagtaggtgctcaagaaatactccctaagaaaagaatgcctttgatgtaccacatactgggaattatcttatgtatgtgctctttcaatttttattttttagcctgacacagatcttggaggtggaagtgctgttatgtgcattttatagacgagggaattgagctggggtgtggagctggggtttgaattcttatcttctcaatccaagcatgggctcttccacacatcacactggcaatgtccgtgctctttttgcctgaaaaactctgggaaagaggctgccttgagacctctgacccctatggcttgggggaggtacaatggctgaggctgatggacgacagtactttctgcaagctggggctcctggattgggggccacactcctgagacagcagagtgggagcctggggaagctcccccagagggaagtcaggcctggcctggggattgtggggtgaccttcgctgcaggggatccctgagtttctgccagctctgccgggagccctgacctctagaagctggtccaggctggttggcaggtggcttccctcctgtggctgctttcaggggcagccctactctctcttaggctccattcatgctctttgaacagggaggagctggaggacttggaagggaatgtgtgcttccggtggagtttgctgaagtgccatggagggaacactagcctgagagtcaaaacacctgggcttcaggtctgtcttacgcaagtcatgaaacctcactgaaccagtttcccattggtaaatgtgctgatgcctccttctcagggtggctgtgagaatcaaatgaaatgatttgcagcaccatagcagagatatggtgctgcaggacactggctgcagacaggtctctactaggtgtcagagccgtcggtagggttaatgcaggtcccttaagagagattgagtccttctctagcaataagacctagcatgactcaaaagcttgcagaaacactttagttgaacaagtctctgggacaaaccaaggattgtggggtcacagaagtcaactgttaaaaccttgtggtaatccaaagagaacagagggaatgcttatggaacaccaacaccacttcttctttcaccaagtcctctccctgctgctctttcccatgggaagggagcattttcagaggagccctgagagatgggggctcatacccagccagcagtgtcccagctttcctggccctgcctggggtagtccaaatggagtgcaggagaccggtgcccatgggaagcctccaaaagtcttgaaagtttggatttgcaatcacagatgccccatgtggcttcttgagagatgtcaggactgccatttgtgagctgtgttaaacctcagatgtcaggagagaaactctctcctttccacagggtcctggaacagcataaccagtaggactgtagtataggaacgtccagggccaccaaactggacccatcttgcacagtggagtgtattgcttgctaattgctggattgcaatgcctggggatttttttgattatcatgaccgagggatgctattgaatgcagcaaggaaaggccagggaggctgcagacatcctacaatgcacagcatggtcccccacaatcaggaattatctggccccaaatgtcaatacggctgaggtgaagaaaccaacatgtgcaaagcactgggcctggcaggtctagggaacagtgataattcaggtatgaagcaggagcacagagttaatgaaggcaatggcaagagatgaggctgaaaatgtaggttggagccaggcagagaaggatcttggacaccaaatgacaaggttttactcaaaaaaaaccccaaagcattccggggttagttaaaaggccagagcagagctgactcccagcacagggctctttccatcctatcatttggcctctttccccaccatgtgttagacaagacaagaatgattcatggagaacagaactagcagcccaaagcaagtcactttttaccacctacaggataaaatcagacccctttgtgaacacataaaaccacgtagatatttctatcactggtttaccatctgcatctttgaagaggggctaaatcagtgtgaacatctttccatgtccataaatatacttcctcaccatgctgtaactatttatctctagatcagccttcttgttagattgtgggctccttgaagacaggaaccatgttgaatcatcgttgtatacctggtaccttccatggtgatagaaatactgagtccattgagcaggatggctggaaaaatgaagcaataggaaggagcagactagcctgctgcatggttgcaaggactggggacggcttccccctactctcttttcctggtatatgagaaatacatgctcattgtagaaaaaaaaaaaaaaagaaaaactatagacaatccaaaagagcaaaatgaaaattatgccagccccctgacctccccacccagagataaatacatttaacatttcagtggatatcctacaccctttctagggttgtatattcatgagattcacatgcacatattttttctttttaattaaaatgggatcatattatacaccttgttctgtatcttgcttcttcacttaaaaatattttggaaactagtgcaagaggaggccaggggatttgtcttgaagttgtgtttgcgtagcaatcacccatttttatggagactgcatctttgaagaggggctaaatcagtgggaacatctttctatgtccataaatacacttccacaccatagcatttaatgtctacaagctatgcaactgtgaggttgtgctataatgtattaagccaatcctcaattgttggaatttgtattacttttatgtttttgctataacaacaatgctgcggtaaatacccttttactgaaatctttgcacacatcccagatttttccttcgtttgaatttctagaatagaaactgctagaagaacacaaaaatgcatatggtacagcttttgaatggtgtgatcacatggctctccagaaaggtggtaccaacatacattcccgctagtaatgttcagagagtgctatgttagctctttgtgaacaaaagctatcatgcagggcccatgtaaacaccaagataagctatttccattccattcaaggacccatttatataagtccagcatggaaaaactgtcgttcttgttattttatagtctaccaggtaaatgtacgcagttttggtaagatgagctatgcagttgttcacctgtttctgaacacacacacaaggtaatacatgtaagagcacctagcgcggaacttggaacacagcagaaactcaacaaatgccttccatgcccagaattgctgctgtgcttagagccctatcatcccttatctggatggctaaatccagtctcctgtcttggaaactgataagccaatctacatacctgccagagtgaatgatcaaaaatgtaagatggagcatgttgctcccttgcttacacatcttcaggtgctcctcattgtccatacatggaagtctggactccttggtaaggtttggaaggctccatgacattccctgagatcccacagctttatccccgacagatctcacctctcccagctcacccaggtcccagccatgctctcccagtgggccacccagtaagattcagcccttcattcctctgtgacccagcacagggcattctctctccctgaaacctgttgtctcccttcctcccttgtttgtttgcagaattgcctcctgggaaacaattccatatgttgacagccttttctacttgtcccacccaagcaacacaatccttttcttctatattcccagaaaatcttgcccaatcattataacacatctctcattgcactgtaataattgtttttatgtgtatatctccagctaggctgtttagaatcaggacattttaaaatttatgtccatagtctcaacacctggcgtcaatcttaggacacagtaggtgcttaataaatgcttgtcacataaatgaacaaaattataatgtccttcctctcttccttccatttgtctagccattgcagggctctgtccaccgtagttactattggttactaccaagccatcattatgatgccttctcctttttcaagtggtgttccagtttccatgaactgatatacataatacttctgtcttaggatcaagcagaatcagctgaaccaagtgctttgctaccattgggcctttaggaagagacagagctggcagggaaggagagagggtaggtgcatcacgagaggcagagcccacgggagcatctagtggggaaagctcggctgagtctggctctgtggcttcaacagggagccccacgctgtatctggaagggaggactgaacttcagagggaaaagcaggaggcacagtacaggaagacacagaaagggagtaggataggggagatggacatggaagcacaggggagagacaagcggggagaaattcaggttcaatgaaaggaaaacaggaaaagactgcagaaggaagaagataaggaagcaacagaaaccccagctagcgtgggtgtgtggactgcagatgtgtaagagcagcctatcttcttccgagtccactagagaagtgtggcacaggagagagccttagctttttactgaatgtaattaatgacattgtggctttaaataaaaaccagctattcgtggggaagcctgacagggtttcttttaacttaatgtttgctgaaccatcccttctatctcacttacctgatgtggaacatatgctgggatcagaatgacagagaataaatcaccagatttgcttggcttctttgaaaaatgaatttgggggctgagatttctcatcagtatatatcttccccgagcagcctcttgacagaacatcaagcttgggggatgtcccatgcaaaggtaaacgagtacccagaggtgcccagatgcccacatctggcaacagatccatctccttgagacacaagccaggccacctgtgctaggctggcaggtgtatccagggcaggatgtgaaagcctcctgcagtctcaggaataggatacaattgtggtctttacatgaaatcaacaaacatatatggagctttaaatatgcatcaaaaacaccacacagcagggaggcttctcagctttgccactggcaaccatgagcatgccctagtgtcttcatctataaaatgggatgaagctgccttatggcttagtttgttatgagtttcaatctatcatagatgctaaataaaagtttgtattttctccctggatacagctagcagctgcaagagctcccaggcctctgggctgaaacagaggcagggaccaggaagcaattttaactctggaaactttagatgagggtgaaaagggtgggtgtggacgtgcatgtggtgtgagtgtgagtgggggtcacgttttctgggttcttagtctatgtctgcaagactttctaacttggctcctgacctttcactttaatatctgtgtgatgttggacacataatttaatctctctgggtatcagtttcctcatctctacaagggggagatgagttggattgactaccttaaaatttttttcttaacattccttttcaggttacaaaagtcacacatactcgttacagaaagcttagaaaacacatacaaagatataaacaagataatttaaaacacccattattctaccacccaggggaaaccagtgttttggtgtattctgctttctctatgcatggtgtattagagagtgaaatcatactgtgtatacaattttgtttcatgctccctccctttaatgttaaattatcataagcattttatctgtgtcattagaaaattatctggacctcatttttaaggttcctcctcacactaaaattctatgaagaatggggctcatctcctttgctattaaaaacatttattctcttacagcagcagaaatcacattgtggaaggtgcccttgaatggtgcttctaaactcccttcggcccatgcatcacgcaaggacaccaaagggctctgtgggccacccggctcacccactttgatttaccatcttagctctcaagaataaaaggaatgatgttgcttttaaaaaaattgaatatcatcaaaaatgaccttattcattggtagaaataggggccacttatacgatagattttcaaaggtggggttgctgaaaatttccctaaaccttcttttccctgttcccttgactatgaatgcttaaaattccttttaaaacaagaccttttgttacaaagttaagattttaaataaaaaagatttggggaaagttaacacattgactaaaattcacactaggattaaagcagagacaatgcgatgtgctcagcatataatttcctcctcctgggttcacaggaagacaggcattgctcagccttcctaggaattaggttcaggcctgagacttaaaagagtcctgtgtgatctttcagcccctcttccctcccgtccctactctagaggccacgagttcaaaatgataaagctaaaagttgaagagggctgcccgtgcgccttggaatctgataggaataaggaataatgctttgttgtgctaagctgagattttttgatgtttatttgttcctgcagctttgcctggcttattcagactaatacaaagatataactaactgatagcagttccctttgtgagactaggtttgggtattagagaagacgagggagaaagtacaggctcttgaactcagctgggaggaaattcagtttggagaggaggcaggggtgccactagctgatttagcgacttttgtattaattcagaaaagaaattcgtaggtttacaattctatatgctgtacatgtgcactgaaactgaacagttaagtaaatggatggcagatggtgggagccaggcgtttcactgttggagtgggaggttacagataagcaaaaggagggggctagaatgatccagatccacgtggtaatgaattagtgttggagacatcagtatgaacttatatttagcttaatatagatatagatgttatgtatggaaatatttatagctatgtatatgtgagggctaatatacacacagatatttcccagctatatctcctgagaaagcctactagcaacaacattacagtagcaacaagcacacctaacaatccagagtttggtttctgataccactctgtaataaaaggaaccagggctccttgaagaaatggccaattctagcacaggatcaggaaatacacaagatgaactggagcatcttgtagtgccagaaaataaggaagtgctctgtgctagtttcctagagatgtcataacaaataactacaactgggtggctaagagcaacagaaatttattctctcacagttccggagaatgcacgtttaaaaattaaggtgtctgcagagccatgcttcccctgaaacctggaggagagaatccttccttgcattgtcctgttttctggtgatttttggtattccttggcattccttggcttgtagatgtgtccctacaatctctgcctctgtggtgacatggccctcttctctctgtgtgtccctcttctcttcttatgaggacactcactggtcacattggattaagggcttaccttactccagtatgacttcatcctaactagtgacacctgcaatatccctgcttcaaaataaggtcatattctgtggtattgggtgttaggacttcaacatattatatttgaggaggaggacacaatccaacacataacatattctcttccaaaaaagccacactaatgagggtctgtcaaagggacacagaagccaactgaaagagctcccattgaccaaagatggcatgctttagcaacaaaatagtgttggaggataatccaaagcaagtccatactgatgtaaatagatgactgaaggaataaatacagaaataaataaatggaggagaatagatagactccagtgcagaattccaaataattcacgtagatgccttgccctcaaagaagtagagtatagcttcccgctccttaagcgtgggctgcacatagtgacttccttctaaagaatacagtgtgaaagtgagagaaaaagaggagctttgcagtggaggaaactgaccaatactatttcagccaggtgagcaaggttggcagcaacagtgatgtgccatgttgatagcacacacccttgataggatacgatggaaacagcacttgtctttgtggtcttccccctcgacctcagtgtaatcttgaaaagagcatcaaacaaatccccatcgagggacactctgcaagacacctggccagtactccccaaaattgtgaaggtcataaaaaacaaacagaatctgagaagccgtcacagccacgtggaggttaaggagacaagactgctaaatgcaatgtggtatcctggatgagcccctggggcagaaaaaggatattatgtaaaaactaaggaaatgtaaacgaagtatggactttagttcataataatgtatccatactggttcattaattataacaaatgtaccatactaatgcaagatgttaacaataaagaaaactgggtgtggggtatatgggaaccctctgtactattttgcaacttttatgtatgtcaaatctaaaactactctcaagtaaaaaggttagcttttaaaagggcactgctagaataataataataataagtgaacatagcctcatgttagggtacatgacttggttagaggctagtagcctgggtgtcagtctccacttacgtcctcagtcaggtgcccttgtgcagtgaacaacctgtacaaccttggtagtcctacagtcagacttaccctctatcaccattttacttagcgcttatcctgcacctgaacatagtactaattggtgctaggaatgaacatagcctcatgttagggtatctgacttggttagaggctagtagcctgggtgtcagtctccgcttatgtcctcggtcgggtgcccttgtgcagtgaacaacctgtacaaccttggtagtcctacggtcagacttaccctctatcaccattttacttagcgcttgtcctgcatctgaacatagtactaattggtgctagaaataaaagcatagtcaattacatcatagattacagaggatcacctatgactgtcaaggagaaaccccatgaacatccatgatcagtgaattcattgtcaagaagcacttccttccaagcccggagagttacagctctggttccctacctgtgtggaggtagaaaagcccagtgtgttaagggggatagtgttcttatggagaaagtgtcctcaaatcacattttgcctgtgaagatgaagtaggggagaatcttatactaaactctactgaatcctcgtgggggcaagggaatgtggctggtgcgggccgggagagtgatggaaaggagagggattcctccagagttttgtcctcagagagttgttttttgtcatttacacgtggcgtggtgacagcaagccaggtgtctccttatggaaatatcttaatacagcagaaacaagcattttgagttatgcatgccaagtctgacattaattttctccttttcagccttacaaagaaatgcaccagtatgtttcttcccaagactggccccacctcctgcatggtcagagcctcacttgtcccttccttgtccatcacatgccctgtgatatgaagcgttccaggggagtgggaggggcttctcaagaagccttctttctaaggggcaggagagcccaggtgttaccgtctgatgcaatgtaagggtcctattgtgtccctccaaaatataaaacaacactgctgattaaaaagcctatagaaggccaggtgcagtggctcatgcctgtaatcccagcacttcgggaggctgaggtgggcggatcatgaagtcaggagatcaagaccatcatccaacatggtgaaactctgtctctactgaaatacaaaaatttagcagggcatggtggtgcgcacctgtagtcccagctacttaggaggctgaggcaggggaatcgcttgaacccaggaggtggagattgcaatgagccgagattgtgccactgcactccagcctggtgacacagcgagactccgtctcaaaaaaaaaaaaaaaaaaaaaaaaaaaaaagcctacagaatacagttaagctaaaatgtggattagaaagcaatttggcaatgtgtaccagcagtcaaaaaaatgtacatgccctctggtgcagtaagtgatgtcacttttgtcaacctgttccaagaaaataatcctaagcactaaaaaaatctgtgagggtaatagcaaaaacagcctaaacattcaacagttgagaaatggttaaataaatcatggttcatagacttgatggaatattatggaatcattagaatgatcatttatgagaattacataatatgaaaattgcatatgataactatgctaaatgaaaaaaggggaagataaaaatatgagtaaagataattactaccatgttaaaatatgcataagaaaaagactcaaaggaaattcaccgaaatgctaatagtgtttgtattagacaggtgggatttgagttgattcttttttcttttctttggtttccaaattttctagagtgtggtaatattacattataataaaacttttttttaaatgtgttaattcctgtttcctaaagcaattaatagtagaccagcatttcattttatttgtagaaacacataataatggtcatcaataataaaataaccttcataaaaattaatagcattaaaataaacatggcctggaaaaaatagtgtaatggtttcctaacagagacacactgacttcctccaggatcacgtctgggaaactttttcttatcaaaatgactgaagttttgtcatttaggctagttgaggaaaacaggccaactctaggcctgcatgctgctcacagcctggcagcccagtagcaaatgtgctgccaccgggctccttgggctgaaaccatgaagcatgagctggcctggtctgggcatctctgttggtctgcttggagggcactctggatgaagccctcatttgatttcctaacagggctgaagctactggccaggccgttggttgagatggagagtctgcaggaagggaggacagggcatagagctggtctttcctaatgagcagaaggagctgctattcctgcaagcaggggttggaagggagaggcagtggctctcttcacactcccttatctgcagttagaggaaatcttagcagatagagcaatgggttctggcttttgcctgcattaatggcaaggaaagggccagcacaaggggccagttatgtgatcggtaggagtgtgggctgaacataatgttagttcagccagagggccactcacaagagagaacacctgacagaatgatgaaatgatggagccaatcaacccccacacagatgtattttctcttcccctatggcacaaattttcaggactctgatttgcaagacatggaccagaaaaagacagcctgctttatgtgtggggagtttgcacaattaataatataatattgcaagggccagcaatttgatggtatttattattcacataatttaaatcattgccaaatgctaaaaacaatatagtccaccccacccaaatcaatataaacatatcccaaatacacagcagaactttctccatattgtttttcttgacaaagctgaagaagggagacccaacttttcatgcaaacttctggcatcttcttttcatgtttttcactagaggaaaaaagtctggttcttttttcctggaaagataaatttttaatgaatgtaaatgttctttcaattccttggttagatggaagggatggtacagcttggacagccagcctccggaatataattgacttgcttcttgttatttcttttccctttcactacccagtgaagcacaaatgctctcagcttgtgcctttgtttctgagcttgtcataccctcagccagcagatacaggttgccttagaagggaacactcctgatgaattggcctcactgcattgtcttctaacaatggaagcaggtctactctgacatatctgctcttcaccctgcttcttcttggcattcattaagtttgtatttatcaaatatctattatgtgccaggcactcttctattgaatcctcacaactctatgatgtagcttctattatcatcatcacccccattttacaggcagggaagctgaagcacagagaggtcaagtcaattgccccagctgatccatgaccaacttggtagcccggctctggagcccatactcttagccacgacaatattccgcctcccatagcatctaaaatctgctagacattgtgtgcaaaaagagtgggtgatggagttgggcttgggacaaatgcacaatctggaaggaaatcgtttctaaccatctctttttcattcctatggacgttgcctcccagggctgctctccaagccccaattcttttgcatacatttgggcttccacttccacttgctgagatatggtttttcccactgtgctactcagacagggtatgcaagttgcatttgacatttctgcagggtctgtggcccttggttttgagactgagacagggctgtgcttcttcccttgcctcctctgtccatgttctaacaggagctctgcagagtggcaaacactcctgtcaaagaagtccaagggaacagtgcagccacttctcagggtatccacctggagagaagcctgcagcattaagctcacctctgagggctgctttaagaatggaagaaggacctatgttctgccaggctgtgctgcagttgctatgtcttgggttaaaagtctgtttagcctcaccagacccatcatcaccagtcctccacattatagaccacaaaggccctacaattgctatcaaaggaactgattgttttgatctggaagccgtcagagttcaatctggagtcatccaggcagctgcatgttgtattatccgcatcatagggcaaggagagagaaataatagactcttcggtagatttcagttcccaaatcatgacctccatgtgtagaaaatcagcattgtaaataatcattattatcaaagagtgtcatgtattaagcatctactggagtgtgaggctgggcacctagtcaaacaaatccctgtcaagatttctttgacccaacggtgggctgggttgtgcccttccttcctgctcccataaatgtcctctgaatagctctgtcactgcatgcgatgatgctgtaacacaggtgtctgtcttccccatatgaccatgagctctttaggggcatggactactcttcatcacctttgcttccccagtgcctagcagccctggcatacagttggcacgtaatgcaggtgtgctaaatgttcatcttttcttctttctttctcctaaatttagtatttctcatgaccaaagccaacccttgccacgtgcagtgccccatctccttcgccttctcaaggactccctccctcactcagtccctctccttcttgcatctgaagctctttcttccttccctggaccattcccacaaagcagaaagtgagcaaacccatattcaattatccttcactcctgaaatctcccctggacctcacactctgttctggctgccattccacttctctgtatcccctcctagaaaaattggaaaaagttgtctgtacacattgcttccacttcaccttctctcattcactcttgagcctactctttctggtttttactctctggttccaaaaaattgttttgcccttgttaagacccttgccagtctctcaaactgccaaatcttgaggtccctctgtctccatctccccggagttgtaggaagcattccaccacagtggcctagtccaaacttctccagattcatttctcttcaatatggagacagggtaccatgcactctgtggttttctgcccacacttttcttccagccccttcccagtcttcctgttagcttcttcctcttttccactccctaaatatggaatcccgtccttgaactttctctttctgggctgtactctctttcataatctcaattctgaaaaaatatagctgacaattcccatatttataccttcagcccaaacctttacactatatccgactgctaactggcatgtctcataggacctcaaaacgacacagtcctgaacctcttgatgtctcattattctccccacaccacatcctcttctagtcttctctgtcttagtaactaaaacctctgtctacttagttgctcaagcaggaaacctgagtgtcatccctaactccccttacccactctattggagtggtcctcccatgacctacagatttgttcacttgtttcttgtcctcttgcctctctttccgcaatctgaggtcaccgaacattgcactgggctttaagcattcattgactgattagacggactcggtccacatgctctgttggatgaatggatggataaagactggttgaagaacaggaaaggcccagagccttggattcccagacaaaagcatagcctcccagtcttcatgtcaagaggctctcccctggttagcttgatgacattggtcatcgaagttaaccttcctaacactcagtttcttgatctataaaatgggaccagtaacacttaactcatgaggttattgtaaggattcaatagcataatacctagaatatagttagtgctctattcatgtttaattaaaaaaaatacttgttaggcaaccacccaaccatgtgatccattattttttttcctattgttttggcctgtgtcgcaccaagcttgaggtgaacgtaaacaacataaccaggaatgagttcacgagcagagtcattgccagtgagtcagaggaaagagtgatttccaaccctaatcgcagacgtgggaagagccttgctgtgctgggagtgactggagctcggctctgtggagcagccacatctgcttgggtgggggcgctcttcccccatctctgtcctgcatctaccacaagctgggctttgccactgtctcctgttcctgatcccagggggcaaatgacggatggaaccgtcataaacaagaacaatgcctattgtgctctgcttagaaatggcctgtgttcttttaaaaaatatgaataaaataatatactgagcaaactgggtggtgtggaggatttgtcgatgagaatgcaaatgagcatgatgtcacttcttagctttgggaggaaaaaatgagtgatccttgaaatggtctttttctaccgttaggacaggaaggaaaaaccatctttggtaacaaaagatcagaaattgcctcctgagcgctgcctggctgcttcagaagaaaagtctgtgtttaggaaacctcttattgaggaaagagtacattttggggggcctgtacagggaatttagtggtatttgttgacctgatgagatgagaaatagttgaggtattaaatcgtaaagggagggcaggtgttatcataataggacattccaattcatcgtccctggcctgggctgcatgcagccagctacccgcttcccaggcttctgctcacgggagcttcagcttggcctcagcttatgcggagtgaaagcccagccactcctgatggtgacggcatttgcagaaaattgtacatattgtgcagatccatctccttttcttgcccttctttccaaagaaatgaattcactgggcacttatgaaaataaatgactgatgggagaaggctggagccaagccttttgtaggcaaagggatctgagtgcagtttcgaagcccatagccaggggtcagccatccaggccacagggtccaggggcccagattcccatggccaggccaggtgtgaatgagtctgagcccagtgaaagagggagagggaacagagagggatggccagaccttgccttctttgatttctagaagacttcctttgcttgtagacaccttttagcaggtggagggacagttgtggggctgtaggggcggtttctcagagtgtgaggtatgggaatgtggatgtagcattgattcacacttgctgtctgctgtgaaaacagtttagagggaaggcggggctgctttcaaagaaaaacaggtgaaattcattggtggtgtggttctcctcttctctgtatgccacttttccccatttcctggtgcctctgccgaccttcccaaccccagcctcccttttgggggagacttgctcttagctggctagtaaggaatcgagccagcagaatgttaacgatgggaggcagcgagatgtaaataaacccggctctgaggataggtgggccaggaatcagatccctgttctgtcactcattagctagcagaccactgtgagtcatttaacctcagtgctttccaatctgtagaatggacatcatcatggccacctcacagtgttgttgtaaacacaagatgaaatcatgagtggtgttggcaacgttgtagtcatttaacccttcaaacaactttatgagataggtcctattattaccgttatttttcagttgagaaaatggtgatgcagagaagttaagtaatttgccccaagtcacacaacttgcaagcaatagagcctaggctgaaaccaagcagtttagtgccaaaactcgtgtacgtaaccactggactccactggactcttaagttgaatctttacctgtctaatggcccagcaattcttcaggtataaatcctattgcctccgtcagaaaacatatacaaggcagctcacagcagcattgtttataacagagcccagattggatacaactcaattacccattaataggagaatagatatataaattatgttatatgcacacaatgcgattaacaatggttacaagtaacaacatggataaatcttagaccatgatacgaagtggaaaaagcaaattggaaaatgctatataaagtcttaatccagttttataaagctcaagagcaagcagaactaaactatactgtttagggatatacacgtgtgataaagctaccaataacaacagcaaaaaactaataagaagatgaaaaacagtggttacttgtggggatggagaaggatgacacaggagtggggtgggcaggctcaggttcttctattggggggttcacagatggccatttccttattaagcttacatctctgctgtgtgtattcctttggacctttcaaatattacacaataaaattaaagtgttcactatctcacatgtgttaacttttacctttttagctccccacccccacccacctccaataatgtcttgtaaggtttattgcaaaacagcagaggacaagataatgacctttttagtgagacaacaggccagggcatgtaaaagtcactggaaattcctttagactctggaagaaagccacagtgcacggggctttcttgttgtattcactggggaccatgggtcttattttagttttgctaatgcaataaggttgtagtgctgaacagtgcaggcaatctgggtggagtgagcagtcaggctaggaagggttacttttgttccttcaaaccgctcttagttcctttggatgtgcatgctcagctagaggtccaaggagttagccagagagtgaaggagaaagagagtaggagagacagatgataacaggtgcaccagcccagatgtcacttgcagggagttcctgcagaaggtgcatggccacggcagatgctgggtggacaactcaggtcactggcagtgactcacacagaggaaccaaggcaaggagagcacaggtccttcctaagagggagcagttgaaggaagaggttggaatttgagagactaaactatttcacccaaaatgactgagaattaactaaggaaaatgcgtaaatgattgcactggaccaagattactggagtggaccggaagcgtgctcatgctcatgagacactcagataaggaacaggcagaggtgaagaactcgcgttcctctgcatgactgagctccactgtgaataaatttgcaatccaaatacacatgttgcttctcttcattctcccccactacctagattttaataggcacctattgaaaatctgaaaagttatataacggcctgaaagggtgcatttctaatggttgaatttccaatgctggtgatagactgagagataatttgactagggagagagcagggctggattaaagaatttaaaggctaaaacactgaaaatattatagtatgctttcttacgttatttaaaaatacatgtgattctaagacataaaataatggtaaggaagtccaacagaattcagatatttctcatgatggctgggattaatttttaaaataaaatattaagtgtcaaatttcattcaaaagatgtttaggtgtctttagcagttaccttgtctatctcctggataatttagtactcatagatcatgccagcctgggccatggttccctgcacagtattttctgctttctctctgtgaaggcttgttcagtggggtagactcaagaggacatgggctttttaggcagaagaccagatgccagcccctgctctgagcgcttcgtataaccttgggtttttcatataatcattctgagcctcagtctccttatctataaaataaggataataaaagctccctcacagggtggtaacacagatcacatgagagaatatagggaacatgtccaataatattgatttgtattacaaaaatattttaacctgggtgttttcagaaagttaattacaaccaaatgctggtgagaaacaacaggaacatccctggaatgaatgcaaagtggtacggccacgtggaagacactttggtaccttcttacaaaacgaaacagagtcttaccatgggatctgacaatcgtgctgctaggtatttatccaaaggagtttaaaacttacgtccacctaaaaacttccatatgaatgtctataacagctttattaataattgccaaaaatgaaagcaacctagatgtccctcactgggtgaatggataaactgtggtacctccacacagtgaaattttattcagtgataaaaagaaatgaggtatcaagccacaaaaatacatggacaacttaaatgcacattgctaagcagaagaagtcagtctgaaaaggctaaatactgtgtgatgtcaactatataatattctggaaaggcagacaaaagaaagttcagtgtttgccaggggttgggcaggaggaggaggagagagatgaattgtggagcacaggtgtttgttagggcactgaaactattctgtatgatcatgtaatggtggatacatgtcatcacacatttggccaagcccatagagtgtacagcatacagaatgaactctaatgtaaactagggacttcaattcataacaatgtatctatattggcttaccaatggtaacagatatactacactaatgcaagatgctaataatgggggaaactcagggcagaggttgggagggagaggacgtacatataaattttattttattttactttattttttgagacagagtctcagtctgtgacccagcctggagtgcagtggcgtgatctctgctcactgcaacctccgcttcccggattcaagcgattctcctgcctcagcctcctgagcagctaggactacaggcgtgtgccaccacacctggctaatttttttaaaatatatttttagtagagacggggtttctactaaaaccctgttggccaggctggtcttgaactcctgacctcaggtgatccaccctcctcggcctccccaagtgccaggattacaggagtgagccactgtgcctggccagaaatatgtagaaattatttgcactttctgttcaatatttctgtaaacctaaaaatcctcaaaaaaatgaagttttttaattaaaaagaattacagagccacttcaaccaccagttcttcttccccctgtgcaccccaagagcgtacatcagctctttggaggggcatgtagataccccatgccaggccagcctccgtactgccaggctcgtcctcaccctgggtaaaggctcatgcaggcattgggaaaagcatgaatcagaaatgagagtacatttttcacgttgagctagtaccttgtctgcttatgttgccattcatacagccagtaataagccactccactgtcatgtcttcatttaaattgttatttagactaacctttcaatgggacacgtttttatccatggggtccatggatcttattttagttttgctaatgcaataaagttggaatcctgaacattcttttcagtctctagaggtcatgaagggaagaaggggttaaaaaaaaaaaaggcaagacacaacataaaatcagactgattctatgttaaaatggtgaacaaaaaaaccaaggacttgaccagatgaaaagagaggggctcgatccatgtgagttccctggcttgctgatcccagactgggctgacccagggcatcagggctggggattgtcttggatggaaggatctcattctgcccgtcctgtcccgcagcattgggtgtggaggaaggctgaaggaggggacgcgcagttgtgggtaactggccttcaccttaaatatagcaagttacttgaatggtgcgatttgaaaagcctccagtatctgctgctgacatctgaaattcccctccttcctcatgtgaagtgcctagctggtacccactgggtgattgggcactagaaatgttggcacaagtgccctcttatgttaagcattgcccccaaccctgctttttatttatttttattcttttatttttatttttattttattttatttttgcaacaaggtcttgctctgttgcccaggctggagtgcagtggcatgatcttggctcactgcagcctcaacttcccaggctgaagctatcctcctacctcagcctggctgattttttcccacccctgctttttaaaaatgttggtgctccaattagagctgtaccttaggtagagtacatgaaaatctgattgttggcagagccctcggacttagaaaaagatctgcctgattggggttgtgagctagcacagagcaggaagtggggaagggaccagggagaatgtttctggggtggaggtcatatcagggctggggacagaaaggctgatcctgtgaagattctctgcacactattggaggagctgtctgttgcgggagggaagaagaagcctcattcagatcccccagagcccacattcggggccacctggagttagcaaatcagaggcttggggatgtggcactgaatttggggctgtgttactgtgcagggaatatgagcctaggctctgaatatgggaccaatttgaatttagatcccacctctgccacttattgacctctctgagactcaatttctcatctatgaaatagactaataacaacattgtttcaaagagctgtgttgagcatcaaatgcatctgattctcagcgtaatatctggcacagagaagcactggatgctgatagttttggtggcgcggctgttattggttggaagaatctgctggtcagtgtcgggggcccttcaacttctgcttgcagaagcccgattcatctgttacctgggaagctaaactgtccacacccttctcccatggtgatccccagaagaagctctgagggggcactagagttttattagtggcttaccatggcacttagtcccaatctactccacagcctgtgacagctggggctgtgtgatggggcttctgatggggccctggcagcgggagtctcagcatccaagcacaatcagcactgggtcgatgtatatgaggaaagcacagaatcacatggttgaaaagaactgtaattgtaatggaaattcaaatcactccactgaacctgttttctgattcgtattttgtccttgtaaatcagaagcaccgggagcaatttatttctaaacatcaacactccagaatgcaaagaaaaatgaaataattgcattctgacttgctcaaaatgattcatctgcatgtacatgctgatcctgagggcctatggacactgcaaagtaacacatgggctgtttgtgcttttgctaactcctgtgtgctcctggagaggtggaggaaggctcatatcttggggccaggtggatttctgctccccactgtgagaatctgatgactgtggaagtgatggctcattgcacccaccacagccaggtggagaggaaagatgttcctgtgcctgggggctccaggcagcatctgtgcaacccccttctgcttccctgattcatgagcccccaagggtggcctggagaggccaccaggtggccttccctctctgagatcccgggtgcacagctccttcctctctcagaacacactgattcttccttttctttcccagatttctcccttgccaggaccctcccttattgcttgctggggttcctaacctgctggctgatgttcagggtgcctcctgtgattcttgtccagggcattgagtatccagtggatggcagaaatgaattctctggaccccagaaaagcagaggtaaccaaagaattaggtaaacacattttggaaataattttccatttgatgtttcactgaaataattatcattaggaaaagcaaaacattggagggtttccttgtgctggctttatggattagtattatttgtaagtacatttagcctggagctcagtggggagtgtgggggaacccataatatttttaacatgtagagcctctaaatttcccactgtggcctgcccttccaggttcttccaggtccttttgatttctaaggttctaatggatgggtggccacttatttggggttagcataggggatatccttagagaaaccatacggagcagcattagcctgggaaacattttttgactgaggaggcaaaatgctataaaaagaaagaacatgggtttggggtctaaagctgggttcagttttgtagtggctctgtgattttaatcatgctgtgtctcagtttctgcatctgcaaaacgaagagtacagtgggcccgccacagaggagcacatgcagggacacacacgaaaggacttatgaactaccaagtgtgagtgtgtgtatcatctgtgtgtgcctgtgtgtatctgtgcgtgtgcatgtgtgcatctctgtgtatctgtgtgcgtgtgcacgtattcgtgtgtgtgcatgcatgtatctgtgcgtggatgtgtgtatctgtgtgtgcgtgtgcatgtacctgtgtgtgcatgtgcgtatctgtatgtgtgtgtatgtgtgtacctatgggtatctgtgtgtgtgcatgtgtgtatctgtgtgtgtatctgtgtatctgtgtgtggatgtgtgtatctgtgtgcgtgtgcatgtacctgtgtgtgcatgtgtgtatctgtacgtgtgtgcatgtgtgtacctatgtgtatctgtgtgtgtgcatgtgtgtatctctgtgtgtatctgtgtatctgtgtgtgcatgcgtgtatctgtgtgtgcatctatctgtgtgtgcgtctctgtgtgcatgtgtgtatctgtgtgcatgcatctctgtgtgcatgtgtgtatctgtgtgtgtgcatgtgtgtcagctatcccccaaatttctcctgagttatgaattttgttggaaaaataagatgataagagcttggggaaagaaggtgagactcctaggaacttgagcccgtgtggaactcatcattctgcagaaaactagggaagaatctggtttcactccttagagcagggagccaggaggaaggaatggggtggagcaggaggagccgggagaaccagagagatggcagaaccttttcttcctccctggaaacccctctgcccccagtttttattaacttccagtagaataatggaaggcttgccctgagtgatttcttatggagacactaaaaggagctaagtctgctttccagggattggggaagtaactgagcaaatacacctaaaagcgcaggagcctggctgggatggtgagatgctgggactcagggaaggcatcagtaagtggtctcaactccagctgctgtagaatcatctcaggagttaaatgacactccctagttcaatcaatcaggatctctgtgggtggggctctgagcattggcattattttgtgaaccaaagttgaggaccattcctgacactgttgcaggccacctctaaccagatctccaggggctgggccccgctgcatctaggacacatcagttatgactcaggtctggcatcaccaagaatgtactggtgatctcagggaagtaatctagaccagctgaagactaattaacttgggccatttagaatctgactccgtgagacaaagagccttggacttggtatcccagggccttggagcagccctgtgtcctcatctgagcactcagccacttgcttgagctcctgctctgccttctagtctggggaaagataggttctcacaataaagctggagcttgcattgtgatcacccgggtcagaggagcttgaagactggaggctacagaaacggtctcattagggcattagcataagtggtacagaaggcaggtagggaggtctccagggaaggatttctcccttaattaagattcaactgcagtgaaatatcagcaaccttatacctcttgtatgtaccataaaaaagtgctaggattctcaaatatccttctctcctcccttttctgcctgcaaacagcatttgatagtgcaaccttcaggattacctcaggaataatgagctccaggcaccctttcagctgcattagtgagggaaatgcaacactctattcctggcacacaaacaggccacccctacagccaggtgtgaactccaggctttctggctgcacagaaccattcaacccctggacaatgagtgagcaaactagaagcccaggtatcacttttcagcggatttagctgtgatgggggataatgggatggtggagcagagtggctgcattctgagccacagctgtgggaagctctggttaataggatgtctgcttgctgttggaggttggtgagggacagggacatttaggagtgaggacacggggaacactgctttagcagctgatatttgtggtgcatgcgtgcccacatacctgacatttgcaaaaatccaatcccattgggctttctgatttttagaaaaaccttgattaacttgagtgcttgaaaaagatgtagatttatggttacctaaatatattctgcataattgggaattaatgagaaactccaccccttttacatttcaatttttatgaaaaatatttcttaaatacactagctctcttttctatcctaaggattacagttaattgacaatttttgggtctttggggacatcagcctgatacatcatttttcatcaattcatttactcaaatgttttgagtttccactttaagtcaaacaccatgtgagctgctggagtaatgttgccataggtacagtcaccgatggggatgaggtagcccctgaatacaaatctcaagacaaattccataactcagagtatttctgtgtggggtaaccatccccaaatctctcatatgtggaagtcagatgagaaaacaattctaccccaatatgagccatattagcaccaggatgcagtgcaaagagcgcatggtttgcacgagaggccctgggttcaaatccttgctctgccactcaccagctgtgggaccttggccaggcactttctctcctggcccatttcttcgtctgtgagatggaactgttacacctaccctagaaagtgggaaaggaataagtggcagacacaccagtggacagcatagctcctggcctgtaataaattcttagttaatatttgtttgaaatacaaagtcatgctgggagtagtggtgcatctgtagtcctaactacttggaggatgaggcaggaggatcgcgtgatcccaggagttcaaggctgcggtgaactctaactgcaccatggtactccaaccgggctacagagtgagacgctgtctcttaaaaaaaaattgaatcagtatcctaaaatctaagaaaagcaaaagtaagatttcacctcactgtctccaaacacccccaaatcagttggttgaaacctgattaattgctattccataggcaaatgatgctgccaaacagtcatttgtggctgtgaggaagaatggccaggacagtagacattcagaaattcagttttaatgtcacaggttatgactgtcgtttaccaggtgccttaaccatctgcttgcagtttttcttcctttctttgccttggccctacctcacctggagaagttaaccaaagaggagtaagagatcctccaggtggagtgggccatggtcaaggcaggtgggggcagaaacaaaggaaaagcagcccagggagatggcgttagtgccaggcggcccgtggagaaaagctttcgctatactgaaggtctgtgaataatggtgatcattcaatgccattaattaaaacattgatgagaaaaatatatcactttccagctgggtccatagtctgtgtggcgtcgttcttctcatgtctgcgtggattttctctgtgtcctccagcttcctcccacatcccaaagctgtcacatgaggtgacctggcatgtctacatggcctcagtgtgagtgagtgtgggcatgtgtgtgtgtgagtgaccctgcgatgggagggtgtcctgtcgggggctggctcccgcctggcaccctgagctgctgggacaggctctgggcactgcaaccctgaattggaataactggataagtaattatcctactctttaaatcaatctttcttaaatgtatgtatagatctttttcaaaatgcttaacattacgagtattttggtctttgtttagttcagtgatatttctgtgaccagaaatatgccataggaacttaactcttgtttatatcaattagcctgtgggaaaattggctttgttatatggtgttttgctcaaggttgtagtttccaagaacctatcaatgacattaagtgaggacttactgtgtaagggagctgtattccctggaagcttcctacatgggtattacagagttagctaattgattcctccattcacgtgaaaattaagtgccagcccagataagattccaggtgctttgaggaactgagaagagactgagggggcacacctggctctctgcagtgcccagtctgaggggtccagccctaactgattaaacgcaacatatgctccagcagtggcaggctcatggctcaggggacttcataagaaagtgtgagacgtccatgctgtttagaggaaggtggaaaggccacacagggatgaacacaactgagctgggccctgaaaatgaggaacagagatcaccaggcacagaattggagaagtggcattggaagtagaggaaaccgtgtgtacaaaagcagcaaggtatgagaggtgcattggagaggtgcctagtcgcatgaggactgggtgtcaacaaaggattggtgttaggaaactcttaccttccaaagaaaaaaatatatattctctcaatcatatatatgtattatacataaaaataaatatttattattgtacatgtataaataaatcccactgttagtagtgttaataaaatacacaaattatagtatttggctactgtagaatcagattgagattagctggaggaaatggcctcttaatgaaaagagggctcccaccccagaatgattgatctaactttccccacactcttccctcaggcaattgctggctgtcacctgtgctgtccccacaccgccacccccaactcagtacatggggtttttacctcttttctaacctgcttgttttatgttcaatttgttttagctatcaactagatacactcaagggtaagagctccatagggacctgggatgctactgccacacatacaacatctatatctgttgccaaggcaatgggtaataacatcaaattggaagcgggccctttgtggtcagacatagctgagtggtaccttgaagagttatccaaaccaaagagggaagacaagtggcctttgtggttatgcatgtgtctatgtgtgcatatatgtgtcatctatgtttgtaagtatgtaggcatgcatgtttgcttgggaatacatgtgtgtgtgtttcagacactctggctgtatttcaataagggcatgtgaggtacagtttatatcccagtcaatggccagcaacacgctaggaaataaacctgatgaaaccaaaaacctgtgaccattgaggtcttaatctgtgaaggaaattacagtttaggagtgtgtgatttctcaacttgctgtcaagaatctctgagttctgtggagtgcaaagtctgaagatgaccttttcctggcagaggcgagagtggagaagcctattacagagcataagccaatttactttgtacaaataagtggcaattttcttcctaaaatacataagggtggaagggaaatgtgtataaactgaaagattctctcctatggtaaatctcctcttgtttgtggaaagtaaaaagacagcaacccacttagactcttgtgggaagatgtcagcagaagtgagtctgagtcctccgctgaacttcaccttgacaaatatttctgaaactggtttttggttggggaggaggaggaagtaagtatatgagtaaatatctcttggcaaaagcattttagtggaaagagaaaggagctatgaaatatacctccctgctttaatttgtcacttctttttgtttaaaaaattcatgagtgttcgtaggctgaaagtaactgaaaatcatagatcacaaccttttttccaagcagtggctcacaacctgagaatgttcagatccctaacagtggataaactatgttgggtgcaggcttcaggatttccttaggttttcaaaggcaccactgatacaaaaaaggtcaagactcacactcttgtgacttgttccacaatttttggctaggggttaagatcagagggtggatgaggtcggctccacaatcattttggttgtgggaaagggttatgaggagattaagattcagaaaagttggcttatcatttaaggagcacagttcatagggtctgaggagttttagcaggtgtgtggtaacctgcaatgttttcgtaggtgtgtggtaacctgcaatgaaggagttatatgtgtgtgcatgtatgtattcatacattaatgtattaaggtaacatctttgtattcagattaatcccttcataaattaatacatgaaacaatgcagtgatgacaagtgttctaaaaactatagaggacttgtttatgaaattagggctcatactgaaggtcaggagaagggctgccattcatcagtcagcattgatatggagagggaaaggagattaccctattacaagtcatactgggtggaggagatttaattactcagatgctcttatgctcctcaaaggtcctagtgcacctctttagacagtttcccacacaagcctcagcccatctcatctggttttgttctgaaccccaaggttcagtcaggtgcgctgtcccatcacaggaaaagaaaccttgagctgattgcagactgtctctaggttgtcatccattaattaatgaataaattaaacaaggcttttccactctatcatcttgtcacctgaagaacatttattttcagggtgattgctaaactccacagtacaaagtatgtaatagatattacgtttttatttactactatgtatgtaaatgaaagaaagaaaagggaaggacagggagagggaggaagagaagcaaggaagaaaaaccaagggaggagggaattcttgatagtctctgtctttcacggttttcctgctcagcttattcatccaagttcccactcagcccccagcagaccagagagtcaaacccaacccagtgggcctgggcaggtgccgtgccatcccctccaccttctccgtgcggcctctcccttggctgtcctctgaatgtgcctgtgcccccaaatcctcccttcaatgacatcaacaaatttaaaaaatccacaccaaatctgtcacctgtcaaattaaatgcctgaatagtcaccagcctggcagttgtacaaacatccagaccttgaatcccaatttgagtttaaactgcaaaaagacacaaagagaggctggggactgaataagatgaaaggccagctcagatcttcagggaaagctattgtcttgatttttcagccttgatgagcctcatggaggtaataaaaccatgaataacattctccctcatgtgctcacaacaacaatatgactactaatagtgaggctaataaaaaggacatattgccttcaaatgccatcctttgcctctcattgtccctaatagccttggggccctgggctagcagtcatcttctcctacagatctctatctgtaaactaggtgggttggcaggagaattagtcctcttcagtcctaagattctataattccatgacagggagctcaaaaagtttgagtaattatagaagtccttcctgcagctagatatggcagtttcatgtagtagttactgtcacaggtttttcagtgatactccctgagttgaactcctagttggaccatgtgttggctgtgtctccaactcctaacctatcagttagggataatacgagcattactaggtaaggattggatattaaccatgttgtatatttatttatttattatactttaagttctgggatacatgtgtagaacgtgcagatttgttacataggtatacatgtgccatggtggtttgctgcacccatcaacccatcatctaggttttaagccccacatgcattaggtatttgtcctaatgctctcctccccttgccccccacccccaacaggctccagtgtgtgatgtttacctctctgtgtccatgtattctcattgttcaattcccacttatgagtgagaacatgtggtgtttggctttctgttcctgtgttagtttgctgagaatgatggtttccagtttcatccatgtccctgcaaaggacatgaattcactcttttttatgactgcatagaattccatggcacatatgtgccacatgaccacgctgtactcttcaaaggggatgaaactgagaccctgcaaggataactatctttttccaagttcccaagcaggtttgggagtaggacgtggtctgggaagggaggtaggctgactgccccaggccccacctcctgctaacattttattttctctgactcccactgataaaatcctatacttctaacaaagaaatgtcatctgaaattttacaatggagcacaggaaattgccaggtcactaaggtgaattatgggcacatttccatgtggtgggaaagatgacaggagaaaggacaaacctggggaatgaaactctgccatgtacacatgttctaacctgtattttggcttctagtggttgagacctcattagctatgtgtttaaccattcatgtctaactattcaaatttaaaaatctgtttcaatataaaaatataaaaagtcaccccaaatctcccagtgatatgtgcaccacggtagggaacacaggtttcgtgcattcatagacacacggaacctcatgcaggtacccaattatgctgtgcccttccccatctccatgcctttaaacttgtcacagttcctgcctggagtgcttttccccttaccattcacctggattttgaaaaatcgtcctttaacccatttctaggaggcttctgagattcttctacatgtctactctgatgtggttggagagtcctttaatgggtgctgctgatggctatcgctgatgtagtgtttacccactaccaggcactctgttaggcactttacatatattgtctcaaataatagtcctcataggaaggtgacgaaaggaagctcaagttgtgtgactaatatgcccaaggccatgggctgcaacctttttatctgtatccctcagtgcctggcatggtgttatttttcccaaatgcacatttgtgtgaggctcagcactggataaatggggaaagaatgaatgtctgaactagtgtggattaggaggaaggtgagcaaagatgttgcactgcaagtggtagatgctctccaggccagctgcaggactgcagatactgacctggggttgaggagcaattgtatgtagtttggagaatagggccctcatcttgaggctgggagcataaaggaaagagggatccatggagtaagaggtcccttcaggggagtcattagcaaaagagaatacttatttgaaaattaaatgtcttcacttcttttccaggaggctccatgacctgtttttggcaagctacaatgggggtgcagctttcaaggagtcatttcagcaatttagtccttgctccagggctaactccccctcccctgcccaatgtggtgggagggctctgctaagatgtagagcagttattaaggccttaagataaaggcagtttttcatggggtctgtttttttcccagtgacctcctgaggcagcagactccacaggcttactgcagggctatacaaaaaggtattttatgtccttagccttataaatcaattttaattgtaacaacagaaacatcagcagcaaaatggagccaaatgggcgggggcctttttctgcgctttttaaccatctcagattaaatgctgaattgtattttggggtctgagttttgtcatgcaaacgaagaaaaacaacttgctttccaatttccacatgcatatatagaatgaattgttgagacggagaatatattttgccatctcagtgcttctagaaaagataaggggctcttgtaaaaagttctacaatttgtcagctggcagcttattaaatacccaaaacaaatgtttatatagcatgagaaggccactgtcaaggtcgggaggttccagaatggactgattctgctttattcataactgtttgaaaaatctcttgttcttttctttcccccaaaaaacaaatgcaactattctgttttctttgccttaggaaaaaaaacaggcaaggagccagcccttgtgtacaggcctctaataataaacccgcaagcatggctagttgttcagcagtcatgagcaaccctacaataacagagtctcacaacatggaggctttggcttcagcaaaaccttcattaaggggtggcagagcagaggagggtcacccagtcatgaaaacaagctctgactcacatgccctaggagcaaatgaaattgggcaggagtctgaagagaagatggaatctcctccgtgctctaggaggtgcgttataaagccataggtcttgttaataagagggaccccaattcaatccaatgaccatttatttaggtgcatactaagtacaatgtatgttgggtgacacagaagacagacaaggaactgaccgtgccccccaaggatattagaatctgaaagggagatagggtagacaggtacttaagtaactgcagtgccatgtagaataataagggttataagtaatagcaaatgcaaagaagggagaggcaacaagaacaaattaaatattctcattcctttgtctttagaccagtaactttatttgagagctttgtttaactaattaattaattcaatcgctgtatgctaactggagaggttagaggactcacagaagtcactagctgcttagaggttaggggcacagtgcctaaggccccgccctgtacagggctttgctatcatccctgcctctagagaagagatttgccctctccaagatctacatggccagttaaggtgggattacagacaaaaccctcctgatactgtctcctgtctccttgcatctccctccttcccttccccactcaatctccagaatcttttctcacatccagttaacttgagatggtctgaattttggcaaacgaggttgtcctggggctctgggggtctaggtgtgaaaaagttatctctctgtgatgacatgtcattcgcctcagcttgtttcatggctcgaaatagatgtctctcattcttaatgatggcccaatttggtttgggaaaggcagcgtgttgagtcactgaccactcagggcactggagcagcaaagtgaaggatgatggggagggggagtgctgtcatccccttgctcacactggactaagagcatatagttcacatcttctgtaagcttggaaagttatcatttgaaagttgttgctctagagtgccttgacaatctaacaatacaaaataaatcttctattcacacctctccagcaagccaggatcccaggaatatgcagcaacagcggaaatcagtgataagctccctgttatgttgtcaaaacttacagcagcttcacactgccctgattaccatatattagctttctgcagacacacaaggacttgctgggaggcctttcttctggtcagcactttaaaaatattttatgtaaacccccaagtccctttggatccttccagaatctcggatttccacatgtttccaagctctaacatgctcctctcgttaggttaagtagcttgcaaacaccccgtaaatgggagtatggaaccgcaaggaaagacaataaggccagagatcatctctgtgctcaggccctacacctgagcatccctagcattttagaggctgcttgcagccagaggtctttacattgaagagggaaattgcttcccaaggaaaggcgcagaaatggcttataaaatgggcatctgtttggaggagtaatgggaagagatgaagacctcatggactactgagtctgaaacaccaaatcgatcagggaggccgagcaacagagagcagtttccagctgtggttgcagttctgactgaaaccctgagaatatgatggctgttctggaggttgtcttaagcccctcaagcccgggctctctccctgacagctgtgggtgtgtgtgtgcacactggagtgtgtgcagggaggaggtggtacgttaatgagccttgcagccggtctgacaaaccccatctgcttcgttctcttggccacccaagctgtctgccttccctggctacacccatgggcacctggtggccctgctgagggccaaataggagtgttgacatccccttctaagctcccgcagcagccaggctcttaagcagccagctagcaactccatgtgttgttaccccacctgacagttcacaattctgtctttcctcctgctgagaattcttctgttttccaggaggtgtccctagtacccttcccacccgctttcatcctctttcttcagagagaactttgacccagaaccgagtgactgttatggagctacgaggtccttgtctgaattctccgtgtggttgctggcctgtaagctccaagagggtagggggctgtgtctgaattttggttaattgctgcatccctagaaccctgaaaagtgtctagcacatagagtattctcatagctgttgacaaactggacagatacatgagtaatgaataggaacctgtgcattggacggggacggtgccagctacagctgacccttccctcacagcatgcaacgttagcaatgaacttcttttttttctttttcttttttgagatggagttttgctcttgtcacccaggctggtgtggaatggcatgatctcagctcattgcaacctctgcctcctaggttcaagagattactctgcttcagcctcccaagtagcggggattaccggcgcctgctaccatgcccagctaatttttgtacctttagtagagatggggttgcactatattggccaggctagtctcaaactcctgaactcgggtgatccacccgccttggcctcataaagtgctgggattacaggtgtgagccactgtgcctggccagcaatgaacttctaagagaaatcagatcaagccctcaaacattaatttacagtcaagagacaatctctgaattcagccctccccgtcccccagcactggtattgacatactgcagaccttctattgttggtggcaaatatgagcaggttaaggcacttttcgggattagagaatcttcaaactcaatatgcataagaacaatttatcctgatgaccagatataatagattctgttcattaaggaaactgcttgccatttgctactatttaacccattctttctattgtgatcataagaagaagaaggccaaaggatcattaatttccttactttggaactttggggtccttaggatagcgctgtgtatatggcaggcactcattactattgttttgtagatgtggctggtgataataatgagaaggactgggggaaaacgaagtatgctctccaggctaaccgttggtggtttaggcagacggaactcctctcaggatttattcagattcagtgacagcacttcttgaactctgacaccactccacaattaatattgtccactgaacagaatggtgaaccctgagcatctttcccatgaaaggcaagacagatgcacacgagtcagttctgccactccagtactccgcacggtgtctggcacacagtaggcacttcacaaatgctaacaacaatttgacaactagattgcaagctgtagatttcagatgcaaggcaatggttagtaactagattttcttagtccgccctgactttgggcctttgtccatacagcaccacactgggcgtcagggtccttttgttgggatgagtggctctgtcactctttcactgagaccaaggctcaggcaatcaagcaatgcatttcaatcaacttctacaatgatccaatttctgggtctggctctgtttctctatttcccagttacttgcccaagaacatggctccatctaaaggaagtggcctacgggaatctgcgcacctctgctgtgaccgggaagctgggctctcattggaggttgttgggctgcagttcacggcccaggtgagaccacactgcagaacataatgtgcagatcaaggcaatgatgcctgtttctccatttcattagccacagctcactatgtgtcaagtcttgttttctccagtttagactcagaaactgacttccatcattgaaatagggctcgtgtctccttgtagtaactgcaaggctttagggaggtagaaaaaatttagtgaaaataattcagcaactcgtttgagctgaaaataacttgattcaaggactgtgccttcagatacttgggaggcatgaagatgaaggcatttgcagtcttgttttcctttgtgactggggcattaataaggctttgggattcacttcaaaatcattaaaaacatgttcactagtccaaagcacctctcccacctgtgtatgaaacaaatgaattggtgggaccttggatcctcgtagtttgctgctcctggggtagtccctcactaagctccttatcacacatttgcactgccaagatgatatttttggttaaaaagttataaatattctggaccaaaatattaccttgagattttgtccacctgacatccacttcattgagtgggaattctgcccaaagaattactgaagaatgaattcccctgtttatttagagcttgatatcttcataaccattttgactaacattaaccatttagtcattaggacccaggagcacagataattggtattgaggttcacatatgtggtgaatttcaagcaaagaggtctcaaatatgaataagtgaatagtgcccttaaagcttcttattcagaatctacaaagtgatgaaacaaaggcaaaaaaaaaaaaggtgggatccccgaaactagaaaaaccctagaagaaaatctaggcaataccattcagaacataggcacatgcaagggtttcatgatgaaaacgccaaaagcaattgcaacaaaagcaaaaattgacaaatggggtctaattaaactcaagagcttctgtacagcgaaagaaactatcatcagagtaaacagacaacctgcagaatgggagaaaatttttgcagtctattcaactgacaaaggtctaatatccagagtctacaaggaacttaaatttacaagaaaaaaaaacccggttaaaaagttggcaaaggacatgaacagacacttctcaaaagaagacatacatgtggccaacaaatatatgaaaaaaagcttaacatcactgatcattagataaatgcaaataaaaaccacaatgacataccatctcatgccaggcagaatggctttttttttaaaattaaaaagtcaaaaagcaacagatgctggcgaggttatggagaaaaaggaatgcttttacactgttggtgggagtgtaaattagttcaaccattgtgtaaattagttcaaccattgtggtctcaaagacctacagtcagaaacaccatttgacccagcaatcccattactggatatatacccaaaggaatataaatcattgtattataaagatacatgcactacatatgttcattgcagcattattcacaatagcaaagacatggaatctacctaaatgcccatcaatgatagactggataaagaaaatgtgatacatatacaccatggaatactatgcagccataaaaaggaatgagatcatgtcctttgcagggacatggatggagctggaagccattatcctcagtaaactaacacaggaacagaaaaccaaacactgcatgttctcacttctaagtaggagctgaacagtgagaacacgtggacacagggaggggaacaacacacactgggacctgatgggggtgtgggttgggggagggagagcactaggaagaatagctaatggatgctgggcttaatacctgggtgatggtggtgggttcatcggtgcagcgaaccaccatggcacacgtatctatgtaacaaacctgcacatcctgcccatgtaccccagaacttaaaagttgagagaaaagaagaaagtaaaagaaataaaaaggtggattcctttaggtcaccttcttgcagttgtaccctaaatttagaggattcatcattgacatgcagaacacctaaacctgttgatccattcttttgggtgtaaagctttaaaaaaaagaaagtctcttacggtgttggcttatttaaaaacagatgacaaaagacacctggcttgcagttttgtctttattctccaggaccatgaggagcaattagcttttacaagttcatttccataacaacctttagcacacgatatttctggattgagttaaggatgggggcatcaagagatgacttggctctactcaagattccacgtggaaggaaggggcaagcctagtgaatgagtcacaccctgattctgttcttagctctcacttctcccactgtgtgacctgaggcacacaactgacttctctaaaccctcatcttatttctctgtaacacggggaaggatagccgctattttgtgaggttgtggaggggatgaatgggacaaattttgaaagcacacagtatctggcatgtagtagcatttcataaatgtgagctattataattttatttatttatttttttgaggcggagtctccctctgtcgcccaggctggagtgcagtggcgcgatctcggctcactgcaagctccgcctcccacgttcacgccattctcctgcctcagcctcccgagtagctgggactacaggcagccgccaccacgcccggctaattttttgtatgtttttagtagagacggggtttcactgtgttagtcaggacggtctcgatctcctgacctcgtgatctgcccacctcggcctcccaaagtgctgggattacaggcatgagctgctgtgcccggccgagctattatttttatcatgaggtatattccttgttctcttttccctttgaggcagctcttgttgactcttaataagcaaaaaccacacgacgacagttttaactggcttacgtaaagttcttacagatccagagctgagttcatccactacagatgaagaggaattagtgtgtcttttgaatattaatgaataaataacctctttccttgttatttatttgtattcaaaatgccattgctagttctagtgataattattgaattttcaacatttatagaaaaacagcatatactgtataaagataattgccgtattggagtcttaagaaagagttagttttgtataaatatggaatgccagtaattatcactagtgctacatgttaaaattagaaagtaggtaaataacaaggacagtatgtattctttataattcaaatgcatgtcagctcaattatcctacaattgcatagacaataggtgaactgtttttctcctttaaggggaagacttctttccgagtttacgtttcctgaagttgagtgaagattccatggtttgacaagccaatagtatgataatgggcaatattatttaggagtgggctgatggcaggtttgatctctctgtgcttggattcactgcctcaattctgaattatgttacaactgcttagaattttaaagttagagacccgctgtggagaaataaagtcctggctatgtttccattttataatctctcaggctgaattttgaggccagacctgagtacaaatctgtaacccaggaatctcccacgtgctcacaaagttccaaggatactatttaatctcctccttttcaccaaccccatctgcaccccagcagggaggtcagtggctacatgaaagcaaaatctaaggctcttctttgcgccaaagcctggtctccatgttgttacagaccaaagccactctgaaagccgcaggaggctgaccacaatcaataatcgttcaggaaacaaacgcagggaagagaaataagtgacttattgaaaaggcacccggaaatggcattagcacagcactgcttctaatcatagactcagcacctcagaggaacagctgagcagagccttgttaaacaaatgtagatatcatgggtgtttaaaggaaacacgttactttagggaaggaagaacctgttgcattaaaaatagagctaaggtaaagagcatgtacttgtaggcttgcagggagaaaaataacaaatgaggaaagccaacactattaaaattaataggaaagatagaaaaattaagcagctggaccatggataaacagcaaaaaagccaagtgtataaaacagctcatctaagaccagaggaggcagaggggataaacagctcaccctgttgaggatgtttacttttgcatctgtcaactgaaaaggaaggaaatgaggatttgcctgagtcagaatgagtttccaaggaaagaggatgcagtgtaccacagaaaatggtggtgatgatgacagccagtcaacagaagctgatggtgacttagctggcatgctggccatgggatgcgagtgactgagggcttcagcttcctcattgtgggggacagaaggggatggtttagcaatatcctcaggcttctaccttcccatttctcccaccaatcaggcattagcatccccagtcctctggtgtcctatggttggaacccctgctcggtactccctgtcccatgcccagaaggggatgccttgctttctcatccttccagcctatgtggctgcaaaatgacacttgtaaaatgacatgcagaagagcaatgagaccaatgccagatcccagaggggtcagggagctccaccgagcttccctaacttgttcacatcctgtcacgctagctaatgatagcatttgtagggcagctggaataaacatgtgatggacccatatctagaggtgactctggcactctggctgtcccaaccccaccctgatctgaaggctgagggggtcattatgtggacccactacaacccacgggtgggaagctctagatcttggcaccccgtcctcttggctctggctgagccactcagctcttgaatcagaggcttcagcaggaggagaggctcaaatgagcccaagctgattaaggaagtggccatgctccacagaaggacagatcaatcttgattagagtattaggaacgtttcgaggatgcctcgacttagcagacaactggcatggtggctgtatcaggggggcaagagcatctgtcaaagatcaggttgtaaggtgagtctaagtgtctagggccatggacactgcacagccaggacagaagccagctgcgtgccagacgaagtgttttcacagctggggaaaggaaaggcacagattataggacagctgtttgcaattgcttctggcccatcaataaggcaaacagtgacttaggaatgggaagagtgaagaaagtaagtgattttagggaggcagtgtggcagaatagaagaggctcaataggctttcacataatgcagaaggaacttgaatcctgcctctgccatttactagttgtgtggctttaggcaccttccgtaacctctctgagcctatttcctcactacttatgataacatctcttttacggagttgttgcatatattaaataaaaacatgtctatacctagaatactatagagtttcaataaaatattaaccattcctctttactatgtatgctgtttaaagcagaaattgtgtagtagtagtagtagtagtagtgtgtgtgtgtgtgtgtgtgtgtgtgtgtgttgggaagagggaacattagacttatctgaaagtttagaaaatactacagaaagacacatccttattgattgacagatattctcctgcaaacactctgtcttctccccattgtgtagactctggaaagttattgtaattgttgatttcaggtcagcctctactctacctgcagcttggtctctggttttcaaattctgtagaaatttttacagctgtttgacttccttagacatgagacatgtactagatggcaatagcaggggacgtatcccctacactcctgtcctggtccaatgcctaacccatggggaacactcaatacatttatttgaactgaaatgaacctggttggtgggcgaggccgctaggggtagaggcagttggggaggaaggtggcagccatgtgcatgttggagatatgtgagtagctttaggtatctggaccccaaccagcccagtgaagagggtagagatgcaagacttgtagatatgacatcagagggtggcaaataatctgggtccctagcatgctgggcagcctgaggcgacggtccggtcagccaggctcagccaagcccctgagagcatctcgcaggaggtaccgttctgtccccagctgagaggcactaaggctttcccagcagaggttcagccctaccagagccgctcaggggaatgtgcagaaggaggacaagggaagcaactacctgacatcactctgccctgcttgtcaagacaaaacaacatgaatattaatttctcaggcataataaggtgtggaggagcaggagtgggcagggccattgtgtgggaggctgctccttcctgccatttgtcaccggcaggagtgatagatggttcttccaggcagcttcccaattagatggatacagccaccccaattaagagcacgttggccatctgcttcgcaggtacgatggcattaggtgctttgggcggggctcaggccagactttgcaagacactagaggaggcaggaacgctcacatacacatcggtgagcagaggccacaggcatcactgaggccaatgcctaggcctgtcaagaggattgtacctgcagataatctgccaatgtacttatagccttttgccagactcactaccaataactaacaattatctgtaagacagtggctcttgattggtgagcatcagaattatccagggagagtgtttaagaataccactctcccgacgcaccccaaacattcagagttggactttccacacttgatcagggtccaggacacctgggttccacttgattacggctaattaggttatttatttaatgaacagctcattaagatagtcatctgaaatttgaagtgctttcaacaactttcattcattctctcattcattcatgtaagatttttagagcacctaacagatgctaggcactattctaagtcctgggggtacaccaatgaacagagcagaaaaatccccctgccccattcattttgttcatgtgaatactttcttggtgagagtgatttcagctagcacatagtttagagagaatgctgcagagggaggcagatagctgagtttcagggttaacccggagttgcagagttgcgaggcctgctcctgaactttctgaatgaagctttgtagcaagcctttaaaaaaaaagtaaccaagaaggtctgaagataaagcaagccaaccttttcctgcaggaaaagatacacgcatagaagatctgtgcagctagagctaatggcagcttccatgatgatcccaagtggaataactatataaggtgtggattctgacccagaggagtttataatctatcctggggaaatgaataagacccaagaacagagaagaatacaaacacacgataagaggtaaaaaattttgttgaaggagggagcagaaaaacttaaagcagctggggcagacttcatagcaggcaagttgtagggtgttgattcaggcctggaaggatggatgggagggtctggacaggtgggagatgtggtgggagataggacaaggcacaagcagagtctcagcgggcacagcagcaggctggaggcaggacacagaggccagagctggagttgaggccaaacagccctgggtttgaatcctccttttgtcactcactggccgttatagctgtggagaggatacttatcccccttttccaggtgtggaaactatgggtaagagacattgacagctaccttgagttttcgtgaggactaaaggttttatatctcaaggacctggcgtgcccccaaggtgctggatgggtgtgtttcgagcttactaggtctgagataccacgggcacacaaaatgtttttaaagaactccaaaacattccctctttatctctcttgggactgcaaaaggttgatgcactggaatgatttgtggcttcactatgaatggagtccccttatcgcagagttcattatcagaaggctttagtggatatgagaaatgttgtttcttcaattctcagggacagataagcaagcaatctcagaggggttttcctagacaaggcttctctcccttttgttagggctgaagaagctggcagggggacaccccccagcagtgcttctcaccactgtaaagctgatagaatattagattttcatgggtcaacggataaacacagtatatatatatatatatatatatgtaacttccaaccaacatcccttcctttggaaagggcttacctggccatttttggatattcttgctttttaacctgggaccttgtagttttcaggagaagtggcatttgatatgtgtgacctgggcaaaaattatttaactattagggtccccagctccctcatttataaaaggggagacatcattattcccatcttacagggtgaggtaggcagaataatgtaccccctcctaagacatccatgaatgtgtgaatgtgaatgtgttatgttacatggcaaatgggaattaagttgcagatgaaattgaggttgctaatcagctgaaattgagatgaggagagtatcctgggccatctcggtggcccaatgtaatcacaggagtccttataagtggaggagagggacagcagagttcaggtcagaatgacgcagggtgcaaaagatcccaccagccctagttggtttggaagatggagttaggggacatatgccaaggaatccaggcagcctctggaaggtggaaaaggcatggaagcaaattctccctagagtttccagaaggaacacagccctgcagacacattgatttaattccagtgaaatgcattttggacttccgacctccagaactgtgaagatagttaattagtgttgttgtgagtcaccccatttgtggtgagttgttacagcaacaatgggaagcaaatgcagagttaatgagagaatgacatattacaatgctttcttgatctgtaaccttgggcaagccccttgatgtctctgtccctcagctttcataagtataatatgggaatgataagaatggctatcttatggaattgcctagtacacatgaagtgttggaatgctgagacatagtaagggccctggaagtgttggctaacggtattactattatataattactattatataaagcacatagactggccatgtagtatgttctcaaacataactatgcttattatttgttgtatgggaaggagaaggagccttggtgagtgctctagaacttctaatttcagtagctctgcttacaatgtaggcacatatcacaaatttcaaggggccctgcccttttaggctttgcccagttcctgttttaataggaatttatgtttccttaagaaaggtgatctgaccctggggactttttgcaactcatatagtattgaggttttcctttcactgttgtacaacaaactaccccaaaacttagtggctttaaataaccactattatagctcataattcatgggttagaaattcaggcagggcttggttgagtggctcttctgctccatgtggcatccactaaagtcattcagagttactcagctggtctgagcaggagggaggatgaggaagctgatgtctgggttgggctggccggaagagccagggtctggccagtgttgttctctctccacggcctctccaagtggcttgcttggacttcttcagaacggggcttctagtaagtttccagagactcacacctgcaccaggaaactcacacagtgttatatccactgtatactataggtcaaagcagtcaggtataccatatggattcaatgggatccaatgaccccacctcttaaagggaggaatgtcgaggaatttgtgagtatctccaatccaccactcatctttaatactcgctggagtatttaatactcactggagagaactcagggagtgagaaacagatgagatgtgagagactaaacggtccatctgaggcaactcagcaaatccagagtccatgggcctgcctcacactaaccattctggattctactaacattgattatctaccatttagaaggactggtgctaggtactttcatatacttgatgtcttttgctgctttgaaatgaaagcattatacttcagctaagggataaaccaaagcctggaggacaagtgggggtgcaattgaaagttgctcatctaacctccagggcctttgcttttcattacaggctcatataacctggtctttatgcctccattttttctgactctaggcaggcagaatggcctcagcaggaatgcagctatgttagacatctgtgtcctgggagaccctggggcactttgaatcctggtcagaatggaccctaaatgagctcatgtttctaaagtgctctgagctcctcagagagcagaatccatttaactccagagcctggatggtctcattggtgggtccctgcagtgggggacatggtttgtcactgctagcaccaggctgggaccttggataaatagggagaaatcagtctccaggcttctctatctgccatcttttcagccacaataaattaatcttcagaaagatagaaaacaacaaaagaagggagaggggaaaagaaacaacgacctatctgacaagtctgaaaggaaaacaagctttctgctgctacagtgccccaggtgaagtagggggctcaagctggcaggtgggtctgaaggagcagacgaggcaccctggtgctaagcacactccgggaggccggggcaggtgggcagggaccaggtgaagagccagggggtatcttgctggagctacctgtagattgttctggatttgttagcatctctcaaaataagatcaacttgatgctgattaaagctgaaacaccccacaagcctagcatgctgagtgtctgactctagggcccctgaacaaattgttttcccttttcatgatgatctttgtgaactctttggttcagcgtggctcgcccatggggacagggctggaaatggaagcacaggtttcctcttggcacctagctgtcagaactgtccccaggcatcccagcaggagggagacaaacaagcattctcatccggcaagctgatgtctgcatatgcaaatggactgaaggaccctcagccttgaatcctattcagaaacagtctacagagtgcctacctgtgccaggtgcattcacagaaatgatttcatttcatacaacagctctgtgaagcagctaggtattatttacctaagatttgttataaggacgctcaagttcagggagggtaaacaactcacccaacgtcacacatctagctgtggctgagacaggtctcaatcgatccagaaagtttatttaaggatgcatgcccaggaagtaggtctgtgcctttttccaaagatgattttgagggcttcaatatttaatggggaaagggacgatgttaggaaaagaggaagaaatttttaaaaggtgtgggtaaatcagagacaaatggttgcattattttgagtctttgatcagcctttcactgaatacacaattatatgtgagagagggtagaagaataaccatttatgccttggtctggctcagtaaatctgcatttttacctgagaggaagcaatcagatatgcatttgtctcaggtgagcagaaggatgacttagagttctgtcttttgtcccgcacctgtgaagacaagctattgatttacactgtcggaggtaaaattcaacagaaccattttagggtaaagatcttgaggcccacaaggaatttcctctcctagtggacaaattgtgagggacgtatgtagcctttttaatctttgtagttatcttatttaggaataaaatgggagacaatttgactgatgcagttcccagtttgaattttccctttggcttagtgatttgggggtcctgagatttattttcctttcatagtgatttccaatgataaatatgggctcctgacccagtctagggtactttccaccaaccagtagctacaggtaatgtggctgtatgtagaccaatcaaaacgaagcgcttgggcataaaatgcctcttgaaattatgcttcatgtctgtgcacttgacctaggacaggaattttaaactttgacagcctggtgacgctatgacccccttctcagaataatgttttaaaatatgaatataaaacaaaatacctaggattacaaaagccagttattacattgaaatacaattataaaaatattaaaaaacaaatttgtggtatggtaatgtgccttcttctttattaatacagtgaataatgagatctagcaaaggtttaataatgactgtaatttcaagtagtgatgagcataaataacattttgagatttctgcaaaaacattaacatgatctgaatatacctgagattttaaatggtgataaaaatcacaggctactgctgttaccactgggtttgttgtctatacttacaaggaaagggaatactacattcctgttagaagttactgaaaataaaatgcgatctttttccaccatccaggttcattggtccctttgattcccttgggtcaagcactttatgtatttttacacatttaatccccacagcaacccagtgaggtaggtacttccactatcctcgtttcacagataaaaaaactggggcacagagggattaagtaacttgcccaaggtcacacaaggccgccgagttgatacgttaatcaggttgtccttttctctccaaggggggattctgcaaccctcttgaggaataatcatatcaaggagaatcttccttttggatttttcccagttgggttcagccttttctagtcactccccttcctgcagaatttgtcgagtgccggtccttcctctcagcctggttagctcctagtcactcatcagatgccccctttccaaagaaggcttgaatagttccccaccccattacgcttgcccccagctcttggatgtcttccccatggtatttgtgaaacctctgtctgtgtggtcattaagttaacacctgcttttcttgctagatagtgcacacatgggacagaattctgccttgttttgatgatctctatatccctaacacctaactgtctgtccggaaaaatttagatgctcggtaactgcttgcagattgaatgaatggagaataaatgaattactagtcacagatgtaaaactgatttcctcatcatgattactgacttccttgatttcccatatgaccatgcagccaatcatcagctattttttttattgctgtttattaagtgggtccctttgtctctctggccttcagagcatcattctttctctcctgtgaaccttctccaattttttaaaacattatttctgctttcgacttcctctcggcctgctttgatcttccacgttctgcgtggaagttatttctgctttgaactttcacggctaagaagttttgggaaatacgtgttggaggtgttgggaggtatgactccacacagaagctggctctccttcaaagttctgtgttctggtctgcagcaaggtagaagcctatggggtttcaacctgacagcaccatttctactcacctctaagaatgtagctgtgagacaggattcaaatgtttagactggcaacaaatgagtatctatcacgatgcttaaagtgctctcccccaaaacaaatgttgtcattaggacatttaatttctgactctagagtctctcctgcagagggaagactttcttcctcagcttctttgctgcagtgttgaaaatgaggcagagtagcagaggtcatccccctcccttttcaggctgctgggattatggtgggcagagggctttccttgttctgcttttggggtgctccccacccaagctgcctttaattttgtctgtattttcctgttttactgcttggtatttggataagctatagagaggaacaaaatgacattcacccctcagagcccccaaatgttaagaatcaatatggaagtcttcccagattcagattttttttttttcttgagatggagtctcgctctgttgcccaggctggagtgcagtggcacgatcttggttcactgcaatctctgcctcccatgttcaagtgagtcttctgcttcagcctcccgagtagctggggctacaggtgcatgccaccacacccaactaatttttgcatttttagtagagatggggtttcaccatattggccaggctggtctggaactcctgacctcgtgattcatccacctcagcctcccaaagaactgggattacaagcatgagccactgcacctggctgattcagagattttattacatttttggggggcattttagattaccttagagaatgataatattgcctcttctaggggtgagaaaaacagtaatgcactttcgaggatattcatttgaaccagttttgaaaataagtctaaaggatttctaaaaccatataatgtatggctgcaccattacataggtgggcatatcccaaagtgactgccttaaagtcgataacaatcatttgggtatgtaagtttaggtgtgtcatttactttgacttgcacctgagtaagtgaaaggggttccaggtatgggaaggagatcttcaaatgacaggcagcagagaggggcaattttcttcctgtttttatctgaactactctgaaagaggagagggcactgccttgtcatctgattgccactggataatgttccgataaatgacacaatggtaagagcattgggttttggaattagaatgacttggatccaatcttagtggatttgtgaccttgggagcaatgtgacttatcttttctgacacagtttctcatctgtaaaatggggataatatgacttacctcaaagattattatgaccattaagtaaaataaagtatgtgaagcatttagtaaagtgcatgacatatggtaaatatttgctaaatgccagtacttttaaaaagaggtaattcatccgattcttcatcacccatgctgtttattactcagtttactgagtgctttaacaagcagggtcccagttaatcccaacgcccaccccctagagggcacattcttttccctattctgagctgagaagccatgctggcaaggtgatgcgacctgcttgaggtggcccaggtagtggcagggaggagaggtctgaaaggcaggtctcctggcctcatctggggtgactttccctacatcaagccttagtctctcctacaaagtcatcttggaagtcactgaataaggggatctggactttttagaatgtggcagtataaaataatatggaattctaaaaatgagtgtggttgtctaatgtgattggtaaacagcaggaccaggggagtggggggcaagacaggtgtcaacgcagcagacatgaagggtgcactctgctgggtacagatctgccctcactggacccgagaatggtgcttccttaggtctgcatccctgtcctagtcttgcacgtaggctctgcagtcacgcttaagaatgcctgatcaatggcagcttctggaaagactgcacaacctttaaaagtgccagctttgaaatgcatccccatctaggtgtcttagttctaagagtttttatttatttaatttttatgtttttaagatcagagcttagccagactgagcagttgggttcccctgaaagtggtggtggtagattgggaggtgatcccaggaagcagatctgaaggagaggggacagtgagatgggaaaccaggagaagccagcaggagagacagtattgaggccactgctgtgattcctctggacctctgaagaggtctacagaatgcctcccaaatttgtccctgaaggacaggaggctggagagcttgtctgcctgcaagtgttccctgagcagtaacttctggatacctggggaatatttgcatgaaggctgaggggacatccatggtgctggcgaaggctccaaggtgggaaggagcaagatggaaacaggaggaggagagcctgagctcctgcggagtgtccatcccagttcaggctaaaaatcagtggtggatcaacaggatctgtcacgggtgctaatggcaaagccaagagggtttttctgcatctcataaaaggtaaagggtaaaagttacaagacaaggaaatagatgtgaaaaagaatcaatttgcgggtacaccattcatgaatcaataacttttgctaatcaatcctagttggttaaaaagatctttttgaccaagattcacccactagattccataggcattaagaatccagctcagaggtagagtaagctgcctgtgtgatttcaaggacctcgtgtggtcttgtgccccaaactaccttcttacctgccctggagttacttaaaatccttgtcttacagatggaccctttgcattgggaaacctacttcccaatgctcatgtgttcatttacattgtcattcatcaagaaatagttagtgagaacctactgggtgccagggaccaagcatagggactatagtgtggtcaaaataggaagaggagaggtaagaatgggtatgtttgaagagcttacagtatacataggaaacaaggaaatacacatgtgaaaacctttatcattaaaaggcaaactctgattaaatgctaagagagtgtaacagagtcagacaagtgcgacgggaatgtagagggaggttttcagaagactggatttgccaagaaaggctgttgggagggagtgagttttgtcctgagcctggaaagatgtgcatagtctttccacagttatttctctaaccacacaagcaatctgcctcttttgtttttcttccagactaaacctttcaaggtacaaaaataaatccaagagtatggcattaatagccatgttatgatcttaaacctttggttgccttgcaaaagaaaaaaaacccatccccttactgctggaaatcacatcgctggcttacctggaagttgttcatgaatgaacaacccttgctaatcactctggtcaatatttatcataggtacattttacaagatgaattctgtcaccagtgttggcagcttctcaccaagtcccaccagcagctgcaaatattcattaataatattttgtttgggttcccacttgccactttccatcctcctgcttcataagtatgaacagcatcattaccaagtggcgcccacagaatggaacacaaaggcaacttggaaattttaatgaaaacagatgttgagaaatgccattatcccatgcacgctacaataaatagcattaacatttctaagtgacaggcctctgaattggactgcaaggagctcacatttacaattaaatgagggacttatccttttgcatccctggattctacaggtggctcggtgacagtcatctcttagtgtttcgattttagagcggctgttaagagccagctaagcagggattggacaggcaggcacttaggaaggtgttcgtgccagacgcattcattgtctaactgcctggatgcaaaactaacttagcatagcagctgaatgtgaaagctcttgaaatgatttcttctcaaatagtgcactccctgtgccaaggaggggtatcattgtttatgtcactaatgactacatcctgggcctccatgcattttgtaacccctgttcctttattagagcaatcagaaaaaagatcacataattaccaagatgttgctttatgggcaaggggtacggccacatatgccttcattgatgtgaataataccaccctgggcattactatcacccagatttcacagatgctaaacccccagcatagcagttaggagcatggactgtggatcataggagattggggttgaagcctggcactgctacttattagctcttggttctcaagcaaattgtttattttgtatgggcctcactgtctgcacctataaaacagggacagtgatatttactttcaggatgttgggtaagtatcaaatacccggcatgatgctcactgatagctgttggcttaggctcaattttgaggtcactattatcccacctattcactggtgtgagatcaccttcaccaaggtaatgttccatgaggacggtgatggccagagaaatgttggactgaatcagggcacagctttcttggaggctatgctcaatatttattgtcaatctctctgcctctctctgtctctctttctctctcttaagtcagtctctctgtctctctctatctctctctctttctctctctctctctctttacccaaccacttttcttttgaatagccatcccagacatcaggtaaaccttgccctgactgaaagcattctttgaaccactttcttcaagcaaataggtacatttaattctaagaggaccaagacaccttagaagcaatacatggaaacctccttaattgactcagcaattgcagaatgagtccctgagtgacttttaccccaaatttagaagttggaaaggggtcacttacaacagaaaatatgtattttctagtttttttttgaagtatacttggcctatagtatttcctgaggggatcctaatgcctttctattaaagcatgaacccgaagttgtaaatttagagaaacaatttgaggtgagggtttgacataacagatggccaagggactaatgacaagatcatactcttggctgagcatttggaatgtctcattatttgtaaaacattgtttagaaattgccttcctggcatagaactggttgacacacagatattaatgcatctaaccctctaaactgtacagataatgtgcttcttaagtctttatatttaattggctttatactacttaaatattggaaactgaaaaattcaatgttatttccttatcaagtatttctgcctttacacttttaagatgaggaaaatgagccacatgtcccagattccacaacaagagggagtccaaatgggacaatagggtcaagttattctcacagttgacagcacataaggatgatcctaggtgcacacactgtgtgaacagacattcctccctttggctcagtgctgggttaaacgtgcacactgagcgtctactagtgtaaggccaaggggtcaatgcatgtttgctttgaaagtgaatcgctcacaatgattacacgccagggagataaatgtgatggaggaaataaacaaacatgtgaaagttataatagctttaaaataaacctgttcctagaaggagacccctggaaatgcttgtacataaaggcaacctcctccctttcccagagctgagactatcgtgaggaaagcttgaagcgggactgtatttgaagacagcaggttccttgcatgttcaaaaccactcagagctagtgctctgtatctcattatggcagagccagatcgcgagataagcttgtgctgccacaatattactgttgcaaatgtgtggtcctgaagggtcttctttggaagggctctgctctcagaaatggccttggacttgcacgctgggaatgttttcatgagcggacatagattttgaaagggtcagtgtggctcaggaggcagcaactggagaaatagaaaacctactcctttttggtctggacgcctttcttgtgcttcgattcttcaaggatctaacagtgtttgtttcgtgtttctgtttggtgtgcagacggcatattccctttaacatggatttgttcgagtagacttcactatggtgcacagatcaagctatgttaaaataacgttaaaggtctgcactgaagcaatctgaagcagagaattccgcgtttcaggctgccacaccacctttaaatcaacggaatgtgtccgtgtgcggctgtccatagactcttctcactgctgttatcctcataataggatcattcaggttctcttatctggtctcctagatgcttgtctccaactatttcaaacagaagtgatttgttacccagcaccaccctacttcctgcaagaggcacaaggatgaagcaagcttgctctaatggggacccagttttccctgtcctcagttaagtattttatttacagagctaatgagcccttagaagcatgaaataggcacacccacacattacaaaaaggcacacacaagtgcaagttaaaataatttatagtagactggattcactggtggctctgagaccagtttgcccactgcaggtctgcgcagccagatgcaaccctgttgacagagatgaatttgatcacctccacctgcacaccttttgctgtattagccaagtgtgtgtttctttatccactcatctgtggctcccacttaactggcaccctttgaatatcagcagccctccctttggagagccagggaatgggagtcacaaaagtgtttcctcatgctgaaacatgaaaattggaatttctttatgaagacagttggtgatgtgctaatatgtacaatgaatgtatggcctcacacctttagcccccgagtgctgcatgtctccaggtaggcagacaggctgcagacacacacagctccctgctgctgttcaacaaatgctgatttcaaatcacacattgcccatcttcctgagggtcacatttctctttgctcattgtttttgcaggtctgattaagtcctatattcctgaaaatgaggttcagcctatatctgactccagatttatgagggagaattaacaccctgctgcttcctaaagctttattcccttgcaagtctacgttttgtttcagcctttggagttgaccaccttttcttgcaacttctgttgctctcagcgtccctgtctccaaatgcattgacccaaatgtaccagtgcttgggagaaagtttgtcttctattcatttaagattctttttctactttataattatgtaccaggaatagcctaaatatcaccaaaatgtaacctactgcaatacataaagaaatttaagttgcagtttgaggttcgcctctagttcctggaggcactttttagtgctttctgatcccagcacattatctctgttttgcaagctgggaggtgaggttgtcataggtcatttggcccagaatttgggtgggcctttgatttctttccagggcttactttccacacaactgcagccaccagaatgagtcagagctaggctgaaactattaatcggtatcgtggttaacatcttatccaatttgggcctaagagaaaagcctgactcacagataaaatgtggaagttatttgccttttcagaagccccaagaatcctttctatcagactggctcccggcaggaaagagaaaaaactgatgacattggcgatcatctcatctgctcactattgaggaaaaattagaaatcagatcactcaagagcactgtgaatgccgtgacaaaaaattattttgagatgcgattggtttgaaattctgacgtctaagagtcttgccctatctgatttgtaaagaagagaattctcagaacaggagtctcagcaacatccttgaaggccttcctcaccggcgcacctcatgctggactgcatagaatggcactgccaaagcactctcatctgtgcagctggccctgcggccctggcctgtgccaccattccagacacacaaggaatgcaccacagctggcacataattagaagctcacagcaaacaaatcattgcttttttgtcagtgttcctcctactgaccatgctcagagcgtggcagctccacccacgtgccaacaaacacaggacaacaaacagatatagggggaaacaacccaggtgcctccagttgtgtgttttgcagtggtttccctgccacttccctactttccagaacataattttgtttgaaattttctgtttctaccatcgtggagtttcccagtgaaaggcctgtgattaatcctcagtgagttgaattctcctgaagacttatatttaataatgacaccccatgcagaaaacaattcaaaacaaagaagagctgctttaggctctatacctcccagggcttgggaataattgtctcctataaacatcactgacatgcccaagaaggtatgtggcacttgctcaggtttaagaaggttctttgaccccttgtggatgctaaggtatagccaaggaataaataggctggtagaaactttaacaatgagtgatgtcctgaacttgaatgtaggaaaagaattacattaaaacaaaccataagtcagccagaaaagaaaagcagagcagccagaaagattgaagctccttgcaaatccaaagatggacttccctatcaaattttaaacaaacacaactaaaatttatgaaatgcccactacgtgtttgatcctatatgtgctgagtattggaggcagaatgagaattttgatgtggtccctagccccaaggaatttataatatcatcagtgtgaacagaggcatggacaaagtgctatgggggctcagagggggacacagattctacatgaaggagtgtacctaggagatgggtattgaagtgtggtgttgtaaagaatataatcccctaaagaggtctggcttttgccagtacctttgctagtgtctctagtgccttcctttgcctaggggatttggttcacacttggatagtctagtaatgcgatttagggtgggggctttggctctcgaggcaccagtgcactagagactgagatcaaccatatgggcaatcaatcaatcaagcttgcctctgtagtggggccccagtaacaactctgaacacggaggttcaggtaagctgccccgtctttgacgatacttggtatgaattgttacacattgataccaggaaagtaacatgtcctgactccaggggaagaagatggacaaagctctgcattctgtacttctccagatgctttcctgtgttcttcttcctgtagcttattttaatcatttccccacaataaaccttaacggtgcaaacaatagttttcagtcagttctgtgagtacttctcaaaaattatgaaacctgacagtggcttggggacccttttgcccttgcagttgatgtcagaagtaatgtggtctcttgagagacctattcattctgatggttcagttggcataactcacacaaagatgccacaggaaaactactcaatctgatacctttaaggttcctccctgatataaatcctgactccaatgaagccttgataaacagcctttgtgcccttaccaggattctaaagtatatgataagggtctgagccaagccaatatacggaagatgaacagagtgcctgaacttaaactaaacagttcaaaacatctttactgtattgacaatctggttaaaggtgcctacctgggactcctagaggataaagttctttttctttatcttatttaccaaatgaaacaatgtggtagcaagaaagccaactttctgttgtgcatatgacttgtggagagaagagaaaatgttgagaattttttccttaactcctcattgcagaatgagtcaataaaagagttatcatctcctagtgcacaaggtggacgttatccagggggatgaagcatgcaagtgttgcatggtgagatttgacatagggctgcatcctccaggaagctttccctgaacctggtggtcatggaagcctcacagatgttcgcatgacatcctgtgcctgactctgctgtagctcttcttacagaacaacaaacttatttgtgtgctgccttctaacagaacctgagacccctaatggttgggtcagtgtggtccttgctttggtattttcagtccctcagacatttatgggcctgacccatagaagatatttgttaagtatttttttggggggcggggggttgaatgaatgaactaacaaacagcttcagagtagcgtggtttagaggaaagaatagaacttttggattaaaaagccagttgggttcaaatccaagcttggtctttaacaagtgtgtggccttgggtaaatgataacttcatctaaaatccagtttattcaactgtgaaataggtttaataaaaccagccttagaaccctgagggagacaatacatgtaagaacacttgctctgtgtctgacagctagtaaatgttcaatacaaattaatctcctttctttttccttgagtacaaagaagaaaattatcaaatatagctgagataatatttcaaaactctgaattcaaaactatgaacttgttagataaggacatgtctagactcagagtggaagagaaacctggtgaattggtgggtaggagtctctatcatggaattacttccacaataattacgagggaatcggatcttgtctaggacacaggtccagatttaaaagaactcctcttcccacctcttccaatcctcgctacatccaggaacttactctgctgtgaaagtgtcacagcaacacagggaataatgactccatctcctctgaactgaagcataggtaggctaactaaaagtaattttacaaaagatgtcagtggtctggcaacggtacctcagtgacaaactattgtgattaaaggtgattttgtcaaagcataacactacctctcacaatggaagctttgtttatttcacatgggacagcaacttgctatccatttctagcagctcgcagtctatgtccaggcatacatcctatctctctacactcctaaagccccaaagaactgccatttacagaaataggtctaggatataatctgtagttaaatgcatagttgatttatcattatcttgggttatttggaattcacgttatttatattactaatcctgtccccagacctgtaagtcattgcccatcatccctctaacaaataataataacaaaaaatctccctcaacattatatttggacatcatctgtctgaaaggtaataagatacagcaactacaatgattgaaatgaagggaaaggattgttaatataatagaggtttctactgggcatgctttaaatcaatgtgcagaagcaatttgaacgacccatcctgtcatcatgtttaaaatacattgatttctctctttctttttcccccttgtggtttttatctcttaggttatttttccccttcctgtgaatttggatagcgagccaaaggaaaagaaacttcaacaagaagactggctcaaatcactctagggccagactgcaccttctataacatttctaataaatcatggggaaaaagaaatctctgccatagtggcacatttgacaaattgaaattaaattttgccaactctggagaaaccaagataacctgctttgatatttcttccctgttaatagttaatgggtaagaggggacatttgaggtttctgttttttaaagcgcctccctctgatcaagtgtgattctcaaaaccctgagtccatattcagcatggagtatgagttcaagggctaacaataaatatggatatttttgcatatagatgtatatgtatttttttcctttaattctgaaattattatctcagacagtggtaaatggaattttttgctagcagtgaattttcagtgttatcagctgtcaggttggaaaaatgtatggcagtaataaaggggggaaatatatgatccataaataaagaaaaacgggacttgtttggcatgataaagttttaatgcctctaggtagcaaagtctccaaacaaattcccttcctttaaatcttatgctcacttcagattgtgtctctcacattcctgctcccaggcctgtaaacagtgctgtggctggagagacctgcataccaaggaagaagaggtactgcatgggctgcctccaagggaggacttggcttttcttcttctgtacgggtcagggtgaagagtatgtcaagcctctagccagcgatgagccatgaaaaagtttttcacagaaacagcgtccatggagagcgcctttgtgcctgtatttctagaaatttccatatgctgctgaaaaacaatgatcaagatcatcaacatgtattgatcatgtacaacagaccatagtcaaggttgggtgcagcaatactggggtgaaggcacctgccttcagagagctcattgtcttttgggggaggaagataagacaccctatgaggctgctgaaatagcctagaatagtgtttacatgcaacacgtggatgaagattattagttgaataaatgaatataaatgtaaggttggcattaattaactgggaatggaaagggcattgaaaagttgtgttttgttttgttggggggctggaggaaaaggggttggatgtgtatcaatgcaggaaatgactcctgatcagggaggagaggaggaaatgccgcattggttccagaaagctgttcttcaacatcactttatattacatacattttgtttttaatgactggtttgccttgggtaaaaagacaatgatgagtcagcatattacaggcaaacaatcgaggccattgtgtgaaggtctttgctgtggtggaagtgtgttatctccctgaaacatccaggcgggttcctctgctgtcactgtacaatttgcatgcttcggtaatgttttatgtattacgctacttatacgctaaaatgtacatgcacgctcctgcaaatttaggtaaattatgaataaattaaatcttatctaaataaacaagtgtctttttgaaccaaaatgcaagctgtcatgaatatttaagtggacaaggatgaatcctcttcctgctgcacttcgtacagagtgcattctatactcttgattgcaggaaggaaagtgtacacagctagagaaacataatcgacttctcactagggacatgaacgttgagaaatctggcctggcagagcgatacattaaaaaataagattcattatggaaattaagttatatgggtgtctcctgaccctggtaatctctgccttttcacactatattggagatgcagagtttgagcacagagttattattttgatctttcttttagtggaaagaggcatctcatgcatatttcaactctagaacctaaggaaatccggactagttgcttgttggtttatatatgatttctgtaggaagctcatgagcataaggattggctcattgaaaatcaaagatttcaagaacattcagcgcccagggtcaagtttaaggatctcagttaatgttttcaggccacatctccttagtcttattttccattactcataggatctgagaatctgagttgaaagggcagttggggatggagttagaaaataatcaacagggaagttttataaacttcctccaaaaggccacgctttcccacctacacatattagtcccccttcatccaaggtttcacgctccgatttcagttctctcacaactgtggactgaaaatatatgtgggaaattctaggaacaaaaaattcctaagttttaaatcgcatgccattctgggtagcgtgataaaatcttgtgcagaacagctccatcctgctcagaccttgaatcatccctctgtgcaatttctccaggctgtctatgctatttgcctgtaagtcactcagtagccctctgggttttcaggttgaatttcacagtatcacagtgactgtgatcaagtaacttttattttacctaataatggctccaaagagcaagattagtgatgctggcaatttggagatgccaaaaagaagctgtaaagtgctttctataagtgaaaaagtgaaagttctcaaatgaggaaggaaaaaattatacactcaggttgctaacatctatagtaagaatgaatcttctatttgtgaaactgtcaacagcatattgttattgttctattatgtgattgttgttaatctcttactgtgcctcatttataaattaagttttatcgtaggtatgtatggataggaaagaacatagtgtatatagggtttgggactatctgtggtttcaggcatcccctgggggttgtgaaacatatcccctgcagataaaggggtctactgtcctcttgcatattctgttccttctgtctagagggccctcatcctgtttgtctggaacaactacagctttcttgcttcaagacttgggtcttctccttcatggagccttgtctgagctccctaggcagagcgaggcgtgttaacctagttggaagccccaggagggcaaggcttatgtctgcttcttctccacatatccccagcagccagcacaatgccaggcatgtagaaggcgttcaaaaataaatccctcctaaaaaaagactctcctgtggtgtctgagcttattgaataaatccctctatggcaccataagattgctgtaattcattattcgtttacaggttagtctggcccaatggatggctgtgccctcaaaggcagaggtccatcttattgatcttgtatccccaggaccaagttccataagtatttgacaaatgtttgtttattgaaagaaagttatatccattacattgcaattaattgcagcaacaaacctgagacttattagctcctgtgcaccctacagcgtcatcttcatcatagtcagtgtctaggcatccgctttcattgttgttggcagtggtcttctgaatctcaacaggccccgaaggtcttagtcatgctcacctacccaatagttggttttttcctacttaaatcctccaggaaaagacaaaggcttcatacatcgtcaaggtggaccacggggttgaaataaggaagcacaatagcagtcctagggggtaaccttgcttcccgtttttttctccagctctggatcagccctgggcaggccctgcaccaggtgaggatggggtagggtgaggagtggatgcgtgtccactgagctttgcagcagagaagaggcacggcagaggagagaagagagcgctttcagaggaggtggtgaggagggaaggggagccgctgagcctgcctgtgagtggttgctgttcggagggccagctctgtcaggagctctatctggactctgcactcaggacaacagacagagacagcacattgatatcaggtccagtctgtccctttccacatggatgcccctgctcaatcggccatgtatgaacttctaagcaatttctatgagctcattttagaatgtaactctctttgccatgaaaaaaacctcccttcatatcaagtctaaatctctcagggttctgtaatgtaaatcctcttctatctactctgttctcagtggagagggctgacacctggccccttccttctcaccataagcatatatccactgcaagaccatgaccatattggggttcatcctcttctttttcagactaagtcccccaatatccttcatccaccttcacttgggacctcatcctaggaacacagtgctcatgtgggacagatggtcttgtctttgcagagcttcagggtcagacctggcttggcctacacgtgttggtttataaaatgaaactgaagacctcattcccactgcaggtgatatggaggtgatggagcaacaattaggggctgtaatgggccagttaatgttattggtaatgaggacacatttactcacagaaagtggactgccacctgccaaatggccaatgtccctttgagccctgtcatagacagaacactgggccgaccatgagtttgactcaatatcatatcctttcagtcagactgagagctggcctctccatcggagagaatatgggtcaagttcagaaggaccaagcatcacagatttttttttttctttctgtaaatgcagggcctttacttggtgctgtgaggaacttgtgagttctgagttcatctgatccctggactccctgcctaactgaacacaatccaaagtcaaactgaggggctggctcacatttctatataacagtgtcctcgttctcacctgccctttaggacaatatcctgcattatcagagcagcaagtgatgacacagagcagctctctgggaggaagatacggtctctgagcaagacaaaaacaagaaaaaaacactaatggaaaacccactgatgcagttcaaactgtgtccccatcagtatgaaaggcaagtttgcagggctggagacaggctttgatcttgcctcgaagtcaaaggcaatctggaagatctccaagtgtaaaggtgcatgagaaatgcttccagtgagtgagatttcatgggaggttggagtgggtgagctcactcactctgccgtatatcctactggggagaaactccattcccaaagtcctgctttcaattgtgatctgcccagtctcgtcccacagagacttccagcctagtcagctatgcaatcaaaccaaagcatgcctaagcgataactggagtcccgacggctagtgagtgggaccgtcagaggtgtttgaaccagagcaactccatcctgaataggggctgggtaaaataaggctaacttatttagccttaaaataattttcccagtaagttaatcacagaatgagataggaggtcagcacaagatacaggtcatggagactttgctgataaaacagcttacagtaaaaaagctggctaaaacccaccaaaatcaagatggcaacaagaatgacctctggtcatcctcactgctacactcccacccgtgccatgacagtttacaaatgccatggcaacatcagaaagttaccctacctgggctcaaaaggggaggcatgaataatccccttgtttagcatattgtcaagaaataatcataaaaatgggcaaccagcagccctcagaactgctgtctatggagtagccattcttttgttcctttactttcttaataaacttgctttcactttatgctctggactcgccctgaattctttcttgtacgagatccaagaaccctcttttggagtctggatggggacccctttccagtaacatcttcctggtaacccaggtgggacaatagtgaggaaacccccaatccaaaggctaactttgggtaagtggtgggggtccggtaacatctttctggtgaccacagaagagacaatactgagaaaaccccgacccaaatgctaactttgggtaagtggtggggtccggtgacatctttctggtgaccacagaagggacaatactaaggaaaccccagacccaaaggctaaccttgggtaagcagtgtggtgtggtaacatctttctggcaaaccatggaagggacgatactgaggagacctccaacccaaaggaaatagactgcagcactgattggcagattttgggtaggtggtggggtacccagataaaggatgggattgggttaggggcccaacttagggcagttggagtctctcctaagacagaaaccattaaaggctcctctccataaaaggcaaggacacttgaccgaacttgagtttgaggcccaacttaggaaggttagagtccttcctaagatttagggaattagaggcctctcttggtaaagtctctctcagctaagaatgggtttggcactataggatgttaactgctattctctttggattattttacttggcactctttgctgaaggctatgggtgacagagttaagcatgtataggatcttgggacatggggagctttttcctccctaaaaaagggaaacttgagagccaacaggtctgctggaagagatccttttgctaccaacaagcagccacctgaaattgtcagtgttgttgcaatggtgggtcttactctggcctctctgagctctctgccttccccaccctgctgtgcacaatgcttttttctctttctctttttgatcttttctgttactcagggcaaccatcttggccagcgaccacaagttgaaactcctggtcagagggtggattaacgatgatggggcccaactgggggcaagtttgggccttacaagtttgatattgagtactaagcagagtgccagtgtctatgttttgtcacatgtattttgctctggaaaaatggaaaaagataactttctcttatgttgcagcttggcacccagggctatggtgcagtgagctgggtcactagggctgctcagggaaagggaacccagaagcctggcatgctggcaaaagggtaagaacttcttaccaatcagacttctgggctctctctctttgtgcaaactggttgaatgaatggtaaaaatcactgtttatctcctctgttcaaagtttttattaatgagaaaaagaattcgtgaggctaatcttaagctgcagggaatctggtatgctctgtgtgtcttttttgtactgttttgtcataaagaggggtaccttaggatagaatgagggcctaggaccccaaaaacctgctgttcaagatggcccggaaaactggtcagccatgtccttagaagcttgatcttgttaccatgtggccgtcctttctcttttcagaatggcagcctgggttcatggctcaattcccagcttagagaatgggttattcttggcttaatatctgtttgacctttaccatttgtttattctcttcccttctatgaattaccttaaattttcctttttctgagcaaagaaatgttggctgtttggcatggctaaagttggataaaaaaagatttaaaggactttttaaaagagtgctatagttaaaagtcatcttaattaaaagcagatattcaggctccaacggcctgtagttccttgggaaaaacagaggaggtaccacagaccttgtttggggggaaaaaacacacaaaaaaaacacaaaaaacctctgttttcctcatggaacctcaggaattaaaagtggatcaattcctctcaaaatctaaggttctcttctgttttgcattgtgttatctgatggttttaacttttggggatatcagaaattactttgcattatgagagagctttggtgtgtagtaactaggtaggaaacgtacttttgggaatgggctgattccctttttgggattcaggatctggtgtaaaaatgggtaccttaatttctggagatctgtattgccttccagttgtgcctgcttattaggccctagaaacttcatgctttaaagagaaacttaaaaactggcaaatgaaaaatcttacaactactggatcttcttccatctgtctgtgcatttatatgttatgtgtgtgatgtttatatatgaaagagctttaattaattcgtttaaaaataatagaagcttaaatcaaatattttaacagaaaaataaaaattatcatgccttttaggtcacatgacttcagtaatctttgggaaataaaaatcactttaaagattgttggtaaaataaagacatttggtcttctgtctggtgtcctaggctccacacctagtacataatgaaaatcccttacttaccacagttttcaccaaaagtaaaaattgctaagagttaacattgtgacacgtatttgagactactaaaaacaaaacaaaacaaaacagacaaacaaaaaaaaatttcacacgcaaggtgtataaagaaagtaaaatgcatttttggtaaaagattataagaagctgtgagaatatggatttcttacttaagtttggaggtttaaaggattgttttaagttagataagataaaactgaacagttgaacaaattgtgaaagatttgtaaaaaaattagtcttgtaaaaaaattgtgtatgtggacatattggctaaagttaagggggtattatacagtttttccataaattaaacatttgaataaaagcataatgagtttttcttagagtgaaaagaaaacctgcctataatctgctctttaacaaaattacaaagggttataaaaggtttatgaagatcttaccttatggtcaggcattacaattggatagatttatctataagcttttattaagaatagggtttaacagtaatagtataccaacggaagggtgaaatttggcttttttggtataaaaatcatacaggaagcattgtcaaaaatgaaatggtatttggctttctttgggctgtatttgtataaatatcttactggtatgtgttccaaaattatgtgtaactcctataattctgatagcacttggtgtagattatcagtaataataagaattgttacataaaatcattgtatgccacagaggtaaccacatttctttgttagtcatgtttttgactgtggctgccctaaacattttgtcatccacagacaattgttgtcttgttttaatcctcttcaaaaggtggcttataaaaaaagatggcttataatcaatataggaccttaacaggtgctcttaaatgcaagtttctgataactttggagattgtgacactagaatggaggaacaaactttcaggactcatggagagctgaaatgttcatgaacatcaagcagaataggagttaactgcatggactaaactaatagtaaactaatagaagtctgaagtaatcttttttaactttttgtttaaaacattgctaatcctttgctttgtttttcagagttaagaaaactcttctgttgagctatttacagcttgaagcaattgagtaaagtacactcctgtaaacagaatttggaacacatttgtttccctctacctgattgcttcagaatttggaagttactcgtgttcttaacttatggcaatatagttatttacataagtgtaataagaatctattttcttttgtaacaggacacaattggagaaactggttattttaccatgtctctgactgaaatggtgtgctttctttaaggaatcaaacttatagagccaataaaagccccttgggaaactggcctcataccttctctacacagtccctgtacagggttcctgacctgtggtaagtaaagaatgtcactttctgacatgtctaggagcccaggtcatcttgggacctcaacaggagagtaacttacccaactcataggtatttgagggtacaaacccaccgcagggcttggctttttaaaaagccttatctgagattacttatggaacagagtttcatcaaagccaattttaaaagcctatgtgaaataattattcttgctgcactttatacaaataatcaggccaagtaaaatcaagtaaatcagtctcaccatgatttgtctttagtgaaaatggaaaattggagagagaaaaattatgtttcaagaactatggtatacctgttattaaattccagtctcatcagttgtttgtttttttcctgcaatgtaggctgaccccgcttattcctgtaaaccaaccagtaatctcaggctgctactcagaagaaacaagaggtctgagtaatgtaaaaatctggattggatcaatattctaatcctggacatatattggaatcaactagcaactctatatcagcttggttcccaacagttgcccagttcatggaaagccttctaatttagtttacatgggataattttgcttattttgttatattgctgttggactctctgtgtaggaatgcagaataagcttactcaatgttttcttaaattgaatgcttatcactcttccagatatcaccttttgttggaactcaagagttataaatggcccttgacataccaaagctttctgactgagctcctctctaccctaaatacaagagaccttcatagtttggcaaaaatatcatcacctctattcagcatgaagaagttacagaagatggatcttcgttcctctacaacccttaggattaagagttctcttataaaagggagttgggaaatgtcagaggtgtttaaaacagagccactccatcttgaataggggctggataaaataaggctaagacctgtggggctgcattcccagtaagtgaaggcattcttaatcacagagtgagataggaggtcgacacaagaggcaggtcataaagaccttgttgataaaacagtttgtgttaaagaagccagccaaaacccactcaaaccaagatgtcgatgagagtgacctctggtcgtcctcactgctacactcccaccagtgccatgacagtttacgaatgccacggcaatgtcaggaagttaccctatacagtctcagaaggggaggcatgaataatccaccccttgtttagcacatcatcaagaaataaccataaaaatgggcaaccagcagcccttggggctgctctacctgtggaatagccattcttttatttctttactttcttagtaaacttgctttcactttactctatggacttgccctgaattctttcttatgtgagatccaagaaccctctctggattgaggcccctttccagtaacaggaccacacagtttgggaaaggaatggggtcccgatggccacctgctcaggtagaggctttctatttctcctgtccctgctgaccggaaatcagctgcagaaggagaaaggcttgggcaacgcagagatgtctagtcacagacatttgactaaagggcggtggggagaacgggcacttgatggtcatgatggggcactacagagaagggaaagagacagaaggtggagacggtgtgaaatgggcagcacccaggagtcacaggtgcggcttttccaatggatgcacctgttgaggatggaggtgcctggacgcacgttcaccatggcacaggcagcagtgaggtccatccattttcaggagactgacagaataccagcagcctgtctcagaactttacttaataaatcaaagctgacaactcccaaaatggtatgaaaacgctttttagtgtccatgaccggcatacattgtattcatttcactttctgaaataagagttgaaccataatcacaaacaatccattcttgtcaggtatcaacagtacatctttctttagccaccaaagcgggggtccctgtaatctggcactgcctgggcctggggtgaaggagtcagagtgaaacagcaaacatcgcggagacaacagctcccatctgcagagcactttggaatttccaaagatatttcacccacatgatctcttttgagcaccatgaccaccctatcagatggattttattaacttcccttttcacaagggcaaatgcaggtggagagggcatagctgacactctatgcacaccacagttgttgtggtgggcagccctgtgtagtgggagaggcttgccctcagacacctgccctcccagtgcttgcgagtgagctgctgggtgggctccctttgttggcagctctaggccttgagttggggtagaggcaaagctaacccagacctgtcctccaggcctgtcctcataggttctcccaactcctcctctatccaaactgctgcctcttttttaacactttgcttcagggtagggttccctgtgccttccacagggatcatgagctaatcataaaaaccactaagggtcaaggggcaagagtgagtggcagccatctttgctgccaacagaggaagactttaccaggaacttcaaaaggcagcgttccagccactgcttatccccaaaataaaaggaaggactcaactggttgaaatgtcagacttgggagcctcatctatgaggggcctcagctgtgcaggggacctgaggataatagattaggatcctggagtactctgcctgggagaaaccttcaactggttcactaggagatcccatatccacagccaggccaaagcagcaatcagaacaaaagactaacagttaccggacaggcccaagtcacacatacactgcaaaataaaccttaactccaatcaagtaagaggcagagcagcactagctgttgaaagttcagccaattaatatggtcagcccacctgggtctcactaggcactctctgaaggtgatagggccttgaactgtccctggtggggttgggtaggaaaagaattctgtataaagaaggctttgatctcagatcattctgccaatgtccaattacacttaggacccgactgccattgtgtgaatgtgtattgtgctttaaggtgacatagtgaatgaaagagccatattttggtagagtgtgtgggtcacttcacttagatgatgtgctggtggttcactggaaaatgtctgagaccagaggtcagagcatcacttgtacactactggtcctgaaaagcctattcagacatttggggtgcatatgtgactgagtccatgcagggaaggtacctctcttgattgctgctttctcagcgatatcaccttggtgctatatgtgcaaatatttacatgtaaatgaaaggatgtgatttattgttgaaattcctaaggggaatgccatgggaggcactctggagcaattatctactccccgactcttacgccacacagcgtgtttcagacagagagaacatctcgaatgtcctctctgcccggccctgggaaccacatcctgaacccccaccaagaccaaggtgtctttattcaggccaccttctctatcttccagtgtggttttctgtctttcctaaactgcaggatgcaaattgtggactcaggcttccagtgaaagcgattaagacatcctggcagggaggcaagctctttatttgcccttttttgatgggacagcataaagctggatcatttctctgagctccctggaggccatcaaagtctacatgggcagatggagcatataaacaagccgggcaactcactagctgctgtaaagcagaccgtggctcctctacctcgaggagagtagggcgggtggaagtcaggcacagaggcctttgcacctgcagcctccttgcctgaccctactggctttccatttgccactcttccatgagcacatgaattcagaaggttggggctataaccttttttttttttttttttttttgagacagagtctagcactgtctcccaggccggagtgcagtggtgcgatctcggctcactgcaacctctgcctcccgggttcaagcgattctcctgcctcagcctcccaagtagctgggaccacaggtgcgtgccaccacgcccagctaatgtttgtatttttagtagagatggggtttcacaatgttggccaggatggtctcgatctttcgacctcatgatccacccacctcagcctcccaaagcactgggattacaggcgtgagccaccagcgcccggccgatcatggctataatcttagctctactatttattacttatctagcctaggaccaatcatctaatctctcttaagcccatttgcataacaaaatgttattcataccagtttgcatggtaggaaaggaggaaactgactacttctgagtaccaactatgtgccatatatatagtatctggagaccgtaagtcctctgggaaggtcaaccagcattgtgactccaaagcttgagctatctctactttaatatgatgagagctgggagcatcatgatgaggtgagcaaagaaagctcttgagaagctccaaatccatatacaaatttaagacattacgtctgagctgaaaacatgtgttgtgcttttatcacagtaattttcaaaggagaaactgaggcatggggtcaaggcactgtactaaaggtcccccggcaaggcaatggcaggctcttaaccctgggatctttgctcttggcttcttgtccagctctggaaggcaggtggactccctgagcagaggctgcaccatcctcagctggatgggaaccaagacgccctcagggaatgtccagggagcagaagctctttctgtgtcatttgccgagttccttgggatgttatttctccggggaaacctgttattccttcctagagtcactaaaagctcacagcaggaacttcatgtaacttaagttttttgtgtcgtgcaagtttttttgtgttgttgctttttttttaaaatgggaaaaatacttcctttttccaaatgctatcaatttcaatcaaactgtgtatactgctgaaccaaaaaggctgtttaaatcgctgtgtgtgttttttcccttcagtgtctctcaatccttctactagcttctcgaagaattaagatttgatcttttcaaatgtaaattaagcaatttacaaaatatgtattttggcatataggaaacttggctttccaaacaaactggaattttatcgattctatgaactgccatggagttatcttgtggccataatttgaatctctaatatgagactgttttcatttataacaagaagtacattctgcttttatctaacttcaatctccatttctgcatttttaaatgggtaaaagaagtgatgtcagttttaatatgcttttcatgagtttagtttctcaaatgttatttttatcattttgtcaattttacttattactgaaacaatatttgatgccacaaaagaaattgaaataggaaaaacatccacccacagcttccccagcctaagacagctcttcatattcacccatgctctctccaagtttttgacaccctgcatatgcttttatggagttataacaattctgaaaaagtaattctcaaaataagtttcacataaacttaaaaaaaaaacaaaacaaaacttccttgacctcctttcaaggtctccggctcagttttgcataaaacttttctgcatgtttcattctaagtatatgacagggactttacatttcagagattaagaatacagttctcagtgtctagttaatgatattaatagtggggcagaacgtattaataaatacatggtgactgatcttcaaggttaattattcaaccctttgcatcaacaagtagtgcacatgaatcatctcatgggagtctcctcttacagcattcagggaaaagggttctccagtcttgattgtggatcttttttttttctttttagtaaaaacaaagctcctgttaacatatggcctaaactcttccagtaataagtttcttgtgtgtgtgtgtgtgtgtgtgtgtgtgtgtgtatgtggtgtgtggttttttgtttttctatttttctcttaatagttgatacttctttttaaaaattgtgttaaaatgcactaaaataaaatttatgatttaaactattttaatggtagagttcagtggcattaagtacattgtacattcatattattatgcagtatgaatatgccactaccacccatctccagaaagtctgtacccattaaatcctaactcctcatccccattacctccagcccctgacaaccaccttctactttgtctctatgaatttaactactccacggacatcatataagtagaaccatacaacatttgttcttctttgtctggcttatttaacttagcatgtattccaggttcatccatgttgtagcatgggccagaatttccttcctttttaaagctgaattatattctattgtaaatatagaccacattttgtttatccatttgtccattgatagatgatccggttgcttccaccattgactattgtgaataatgttgccatgaacacggatgtacgaacatctgtttcaatctctgttttcaattcctttgggtatatacctggaagtcgaatttctggttcatatggtaattctatgtttaattttttgaggaacctccatattgttttcaacagtggcagcaccattttcacattcttaccaacagtgcacaaagggtccaattcatcctctgcagtcatttcaatctctttctctctacttggaataactagccacagccctcgttatagtccttcacagatatagattcacccttgtctctaagtcgtggctgtggtacagatgtggagtccgaggcacagagctgttcagccccagcccgaaggcccagggcagggcagaggcaggagtcatcccagcggcagtctggctcaggagcctggaaacttcatcatcatcacggtgttagattggctgtcagagaaactgctcttagcccctcctgcaaccttattgatatggtttggatttgcatccccacccaaatctcacatcaaattgtaatcccctatgttgaaggagggccctagtgggaggtgattggatcatgtgggcagattcgcccttgcgttcttgcgatagtaagtgagttctcaggagatctggttgtttaaaagtggggaatgccggctcctgcgccttctctctcttcctccttctccagccatctaagacgtgcctactttccctttgccttctaccatgattttaactttcctgaggcctccccagccatgcttcctggacagcctgcagaattgtgagtcaacaaaacctcttttctttcataaattacccagtctcaggtggttctttatagcaatgtgagaatgaactaatacacttatttttcaaatttgctgttcttccactcagaactgcttcatgaaaagtagcattatcatatgtgtgagacattatcatgtgtgagactcagtgagaggtgaggctctggcagccagatggggcaggcttgcccatcagctccatcaccagcctttccagtcctgagagcttatcctcctttgcttccctggctgtgagtttgggtgaggtctaatgccagacttgacatgaccaacctatgactctaggagatggtctgtgcccttttccctcccaccaccatctctatgccctctgggctccttcatcagggtttctctggacctggtctaggctgtgggcaggcaggaggggacagggcctatggacccagcaggggctacatagggagatttggaggcaccaaaaggtgttcttgcccttgaatttcttgaaaaggacactggagagccccatcttccctctgcctgcagcctagtatttcccaaagttggttcctgggatgaaagtccctaaaatgcacctttcaaaaagggttccaatgctaagtaagtttggggaacactttgtggggtatgtgtctctgcagagccatatgcactttgatatggtaaaggctctggaaaattccacagtaatgaaacctgtggaattaagccacagtatccaccaagatcttcattaaaatacaaacacataaccaggatgggaactaatcaaagataacaatctgtctacctctcagctttgcttctgcattgaaatgttggaacggggaacaagtgaagacaagatggcctttaaattttttttctcacattatttaattaaactacttgatctttctaagtcttcatgttttaaagtatgatttaacgtaaatgtaacacttgctcatgatagaataatcagacaagtataaaattaaaatgaaaaataactcataatctcaacagccagaaataatcactattagcatattgagtattttctgataacatttttctaagtatatatatatatatatatatatatatatatatatatatatgtatatatacacacagacatatattttttttttctttgagaccgagtctcgctctgtcgcccagactggagtgcagtggcgccatctcggctcactgcaagctctgcctcctgggttcaggccattctcctgcctcagcctcctgagtagctgggactacaggcgcccgccaccatgcgcggctaattttttgtatttttagtagccaggatggtctcgatctcctgacctcatgatccactcacctcggcctcccaaagtgctgggattacaggagtgagccactgcgctgggcccatattttgtatttttatgaaatggtgagcatgccagggataacattttatattttgatttttttcttacctaacattatagcatgagcatccagtttaactgagtggaactgtctcctgaaggtttatgagaaagaaggcactcacatttacgtgcacctatgaggtgagagagcatctgcatttgaggccacattttattctcacatcaactttatggtagacatattgcctcctccatacactgaaggacatgaagcccagtggggtgagagggtggagagcacacgatcgatgctcctcccaaccctccaacatctcttctagagtcctgggtgcccagcccacccacctgtgtgccttgctccaatggaccccacctgtgactgtgtgctgtctgctgcccttgggccagcccaggtgcttcaccctcctgcctgccccaacttgcagagaacaggaattgcttggcagtttatttagccaatgattgctgtgggaggatgagtatttgcttagaaagtccaatacactctaagctatatgttacatcctagagcttcccagcaggatcaagctgagactgggactttacttaaaatcacacttctgtttggcatcatccctgtctctattctgcttccctttcttcttcctgtttctcttgggagcatctgcctaggaatccttgctcagggtctgcctctggggattgatctgagactggtatttccttcatggtcatatgtcttaaagcagaagcagcatttccaggacttgaacttaggtcttccagacctcagagtcaaccgtttttctatcacagacccttccttgcctgattccaaaggaatcagccaatgcgtgtgggagaaaagtcttcaggctgtgggggtggggtgggtgaggctgggccctctagctgcctgggatgtgaatggaaggaggactgcaggtggctgtgtgcagtgggaagctcatgaaggatgagaaacctaccgctatcctctgtatacacacaccttggggaaattcactgtgtcgtgcctcagccttgccccagacagccacagggctcagggcacaagctgcagatgaaagaagtaatgggcttaccactttaacatgctggcacccagccaggtccccacttaccgtgtgaactgcctcgccaaatgtgccaggagcctcctgtacgaaggccagagaaatgtgactgtgggctcatgctgggaagcaatttggtccatttcaaccatcatgtcatggcagcagaatacacaaatatagactagacttgtccaggggagcttttctctcattaaccttgaaggatgacgcacatcccgttgacggctgctctggagcctgtgactatgagaggccaggtttgatgaagcaataggacttaaacagcagacattagtgctgccaaatgcatttttcttcttaatacactaaagatccatcataaatactgagaagggtgtgtgtgggagggacagaaaggctgggatgatgtggcagggtgcatatgcttgccattgggtgctgtctgtcgtcagcaaaagagaataatctctcagttctcacctcctaagaagttagcaatctctctgtctctgtctctttttctcctctctctctctctctccacatgcacacacctccagtgtgagttctcctctgccattcacaaggcagactcatattttggctttgatctcataagaggtcagtagcagtgtctgtgatgtgtgtgtgtgtgtggttttctgtatgggttctgtgatcagaagaggggcagaaatgcttgtgatgaaagatgtgtaaacagttctgtgcagagacagctgataggcagtgtcttctgcaaatgatgctaagggaaagactgtcctcaaagccatctcagtcatagtgctatttatggctggagtggcagaacactcttcacctggatgtcaggttgctagaagggacagtggattttcctaggaaaaagattatttcaggaaagaagcatggtttaaacaaggctgaggttctgctcctggctgtggcatttaggagagaagtggcagccgctgagggatgaggactccagctatgtacagggttcctggtttcccacaaattgacttcatgtgctgctgaggcacaaacactctcttaaagaagttctgcaaagataactgttgacctttgctgagctaccttgcaggtagagccttataaaggagactttataatataccaaagagaaagaagccctgtccttggttccaaggatgggaagaggagaggaacacaggctatctgggggtgaaaagtggtaatgataatgaaagcaaatatggaatatattagcttctttaattctcacgatgggcccaagagggagcttctatcattattcccatttttactgaggaggaaactgacacatggcaacttattcaaggtcactgagcaacatttagcagagcttggattggaccaaggcaatctggttccaggggccacattttgaatcatggtgctatacaagccattttataaacaaagagcaactgaactggacaatggatagcagcctcaaaggacaggaggaagccaggccaataggaggaggaggaggggacccccaaactatatctgagctgcaaaagcttgttcataatctaatgagagaagccacacacataaacactcatggaaaaggcttataactctgacaaaaacatacataaattgaattgacattaaaggtaaaactacacctcaactggggaaggaacataggtgtggaaataagtttctccccaaggtttcttcctcttcttcttggaagagaaagtgacctccaaatgaaccaggtttgaggagaggaaggaggatgaaccgagagtccatgaggcagctagggttgcttgttatagcaccaaccttaacctgagtcttgctatttctgtttttggccatggcaacatatcactccttcctacctcaccctcctttctatctctacatatctcagttgaaaaccaatcttttcttttttggaattgtcttcatcatttacttcttttctgctctgatttacctttagagctgtattaactctgacgttctactattgtctgagaagcgtaatctgaaaggggacagacatttttgaccaatagattaagtagcaggaattcaggaagggagtaaggaggataaggagagaaagagggaggatgatattggaattaatttcaatacaacaaacaggtaacgagcatttgtgatgtgcccgttgctggtacttggtgctgggaatataaaagataagttctccaacaccacactgtgagctcccagagggtaggaactgacacttaaatgtgtaatgacatgacaatctgattaaatttaataaaggcgtgggcaatgggtctgggagcacagagaaggttgcctttatttatgtttcaggcagaaaagctgggaaagttatagaagtgatatttaagagcctcaggtgttgggaaggaatttgctgaatgaagaagggaggaagagcattccaggcagaaggaagagtttgagcaaaggaggagaagtgcatgaccttctcaagacgtagtgattgctctgggtgtggccaggcagcaggcggcgtggaggcagaggggccaggcagccaaaggccttggattagggctgaagagttgggacctaccctataaacaacgtatagttgttgaaggtttctagacagaagaatggcttggggggctgtgtgtttgagagacttcttcccaaccacagggtggagaatgggtggcaggccagtgaggaggctcctgccctggtccaaaggagagaggctgagactcttagaatgtccaaggagagggcagaggtacaaatgcaagatggcacccgtggacacattgaaagtttagtgatcctacacttgattcttctcgcagtttcagaaatactacctcctttgtaccactcttggtacgtgccacctcctatacaaagcctctcctggtgctaccagaggcaaacaaattctccctcctttgtgccctcctgctttatgtgtgtagcctttctctctgggttctctagatttattttaatttgtgtactcgttttgtttgttctcacatgggtagggaaaagggcaaagctctggatgtttgaaaacttgttttgtactaaggatattgttcttgattgctgcattgccctgggaaaattaatttacctctttgaaggcttggtgtcatcatttctgggaatgtaacatttaggctgcaggcaggaaaacagcacccatgcaggtgtctgcaagggagagtgaggcagcccagaggttagtaacagtaggcagccaatcccaggctagaggtacaaaggaaggaggtagtatttcctgaactcaggaatcaagaccacccagtgggaactgggaccacccagaagactcagctactctcttagaagtgatacggggcagagaaagagagatgcagtaccctacttctcccatcctctaccctctaaccccttgacagtgccttccgttggctgaacctacacggtagccagttggccaggaggtttgggaggtggagttcacagggaatagtggggaatggatctgagtgtgccaactggcaaatgaccaatataaaaaattcacaaaaagtctctggccctacttatttcacaggatatcagttagaatcaaatgaaatgatacatgtaaaagccctttgtaaattacagagagctatgcaaatgtacgctggtatattcacgttttatctggcagtcaaaaaaatctgcatttagctgttatgaattctctgctgacctggatctgaagtggagtgtggactgactgcttctcgagggatagtccttgaggtgtggacgtccaaaaggctgccagggatgtctgggggcacatggactgtaccgtgtgatacaaaaccttcctgcagaagataagcttctgggcacctgtctctaaacctttcccatcagaccagttgagtgcacatgagcatggctcgtaggcacctgggcatggaaaaggacctctccagctctgcccttcttggcagtgagcagttagcggccctgaggaatgaagccacagccgagtgaaggcgttccatgctgtccaggtgatggagggaggaaattgaaaagacattcaagagtttcctgagctgagctcttcccctagcatcatgctgttcatactacacatgttgttttgctcctgatgataaaggagatgctagggtaatagggctgacgcagttgaaccctgtagtctcttcagccccattaacccacatccacccaaatggattctcagccagtcccattaagacatcctgtcagaaccttcccacgtcatttgcagagtgaagtgaatatcaataaaattgtaacgagtaattatcccagcttcactgactcttactggaaatgaagccagccctctgctgtgggtattgacaaaaactccattcctcctgggagctgcttttcttccgctgggtaaatctgatccatctcagcagataccaggtgtgctagtttaacattcatgggcacatgggcagcaggtttggaaaggggactctagcccctgtcccttctgggcagtgagaagccctgatgaatgaagaggttcactgctctccacgctgcgtcaacagagcgagtgttgcaccaggaggcagggcacctggcttccccagtcactatcgactactcccaccgtccaccctaactccatcaggcctcattattccatctataccacaataggtcctttccagttctggcattctatgagctgagagacagaacagccacagagaaatcaatctgccagagagtgatgcatttgacagtgtagacactcgaggcccggtctacattgccaggcatttgagaagcagacagaatgggagctttgctggcagtttctcaccgtggctttctgaccacagagagcccaagcatcacacctgctctgtggtcatgacagccagcactgggataccagagctgtgagtgacaaggtgttaattcaaggcttagggagtgtgatggttagggactggcccaccctttcctgttctctgcctgctgtctgaaaggctgtcagcacctcctgctgatggctggctgctggtgacttgctgcctgcttcccccacatgaaagtgtggaacacagcacgaaggtgtttctgcagcacctgggctgctggcttggaacgtgctacctgtgggggaagactggaggactgctcagttgctgttctgtgctgggattccagcctcctcttcctggctgctcaggaaaagacagcacaggccaagctggggttccagaagtatgaatatgtggggaggtgggcatgggtgcatgtgagtgtgtgtttgagtgcgtgtgtgtgtttgagtgcgtgtgtgagtgcgtgagtgcgtgtgtgagcgcatgtgtgtgagtgcgtgtgtgagtgtgtgtgtttgagtgcgtgtgtgtgtgagtgcgtgtgtgagtgcgtgtgtgagtgtgagtgcgtgtgtgtttgagtgcgtgtgtgagtgcgtgtgagtgtgtgagtgcatgtgtgagtgtgtttgactgcgtgtgagtgtgtgtttgagtgcgtgtgtgtttgcgtgcgtgtgtgtgtgtttgagtgcgtgtgtgtgtgtttgagtgcgtgtgtgagtgtatgtgtgagtgagtgtgcgcctgtgtgtagcagtgtagtagcggaggaacaaagaggtacaaagaggaatggaatcagtgaagctcagatccttaaagtcactttaagttgggttttcaggggggattttacaggcttctggggaaccccaagtaggtggtattcctctgccctgcctccctcccgtgccaaagctcacacaacaaaggtaggctgcaggtcttgcctggctgccaaagctttcctagagccagggggccaggaacaagttctgtggggacccctgttacctggctacaccatgtgttaacccagtgctggccaggttggttcagatgacacaggtggtgaagtgggtactagtttcctccgctcctccccaaccgggcatcctccttaaagctgaacacttggctgaagagagggtctgaccagacaatttatattacaaagtatagagcaggatgcaacttataaaagcccttccttatctatttttcatgtgaagtggagaaggtggagttattattctcattttagggataaggaaactgaacccagcaatgaacttggagtgccaaagttcaaacccagtacctcactccatcccaggatctctgtctcttacatgaggggacagtggcttccaaaataattccaagggtgctgataaaggagcatctccgctcctttttcctccatgaaacttggagaaaggcaggtgtgggaccaggagggctgcacagcttgcagtatgcctgcctggccatggtgacatgtgacagccacatggtagaggtgagggtggcacagttctggaattcttattccctgggaaggtgcattgccccactcctgttagcagcaaatataagacttgggctatgtgtctgaactggtcttgggtagtctccatttcacagactccagtctgaattaagcatcaacctgcttgatctttttccataagaagtagtaaccaacattgaattgcactatgtgcttcacatgtattcatctctcactgtaaacccacacatttggtatagaattatccttgtttacagacgagaaaacaggaatagagggaaaataaattgccttgagtgcatgcctctaaagctgatggagctaggattcaaatccaggccacaagggctactttggatcctccctctccatcatgcatataccacaccatccttcccatgcagctcatccaccatcatctgctcacctgcctgttttcctactggccttaggtgtgaacagagtacatgtcctgttcatgattccatggccggatcaaagagctcctcctcactcctccctgcaagcacctgtgcatgaacccacccatacctggggcacttgttataaggctcagggaattatgtgacttgcctccaggaatcaaggcgcctccagcttggaccagtttcctggatcccaaggcctctttctcttctgcccctgggccacattgctaaatatatccctgtatgaacccatttaccatctgtagctaaaatgcctcttgactgttctgagccaagattagaagtctgtctaaacgtcaatgattatttcatcggctaaaagcaaattgaccaagctcaccctccctgcagactaagaaggctctcagtctatttgtagctcagtctgatgtgcaagaggcggctgctctgagttgaggctgcctgctgctttctgtaccaatagggtttgctgagcgggtcattgatgtgtttagtctgggattagtagatactttggtataagtcagcagactcgggttatcgaagcaacaatgccccggtgcttgcacaccctgcagggccaccacagcagaatcccatgggggtggggagctcaggtgggcaagtccctcatggaggtctgcacaccttgttcagcagtggacatcctgatgctcacaaggaagagtttgaactgaacatggtctttgagaaacgtgcagagatgtgaccaattgtacaggaccctgagggatcgacgaagtctctgtttctgtctattttgaatttaaggaatgagagcagggacttgggtggaagaaaaatgcacaaagaagtacagaagttttcctttccaaaaaacttcagcagaatttttttttaaaagtgagagctagagaaaaatacttatatatgtttcagaacatgttttttctttctttttttttaattttaactttgtttttccttgtgatcccaagcttctcacctccaccgagtttccggctgcctcctctgcgctgaataatacagtagccagcccagtagacacagcccattgctgggcaggaggctcccaatacacagggaagggattgttcatttcatacatcatttaaagcctgctgcagtgatttaccggtgtcagcctgtctttggagcacagaaggagaagaaagagaaatatgtatgcttccattgtgtatctggacctggatcttagagagtgatgggggagggaggccgactgggttttcttccttatctaaacactgcggagaagccaaagattaccccacagttaggaagaaagaggataggaaagtggttgatgtcttgcagggagatgctgcttccctttccacctggcctggccaggcagggagggctgccttcctacagcctgtgtatagtctcctcattcccaggtcctctcacttagatccatcctgcacccctgtaagaattatcttctcaaaaccatgctgataccatgctactaaggacgtaacaccttttccccaggcaaatggaatcgctccttgccagtgacagtgaaataggaggggggccgggaagtgcaggaagaaggatggggtccctggggggggctccaccctctggcctgtgcccacgggcctaagtgaggacaagccactcctgttttcacgcccaaaggttgcattttccgagaccactctggcctgccaccctcctcactgcccccccacacacactgaccagcctataaaaaccccgagaccctagcagggaggaatacaccagcagaaggacacagtggcagacgctggcaggccatcaacggcaggacgagaatgacgcagacgcgaggagaatttatttggtcagaggagagtctgaccactgcgtggcctgactccagggaagaccaccttcccattccattccccttgtggcctccgcatccaccttgccgagaactacctccactcaataaaaccttgcactcatcctccaagcccacatgggatctgatttttccagtacactaaggcaagaacccaggatacagaaagccctctgtccttgcgataaggcagagggtctaattgagctggttaacacaagctgccaacggacagctaaactgaaagagcacactgtaacacacgcccactggggcttcaggagctgtaaacactcaaccctacatgctgccttggggttggagcccaaaaaacgttccccacaatctgcctgtctgcctgctccccccaggggtttgagcagcggggcatctatgcagcgagccacactcctatcacacagcctgccatggggataaaggaaattctcccgtttcaatagcaggtcttcaggacctgtgctgggactctcctctcattacctgcactccaatgggtccaggtgcctcgaggttctacacacggcctgccttagccatcaggcttcccattcggctgttctccagcttggaatgctgtttctcctctctcccacttccaaaactctttcaaggaccaacctaacacccactccatctgttactctttctgtaactcagccagccctttctgataagtcacttccccaaacttccatagcacttcaagtcagcaatgactgggattagataacagataatactagtattagttaataacattaatacatttcaccgaatgattaccgagtgccatgccccatcaggatgtgctggtaatatttccaggtgaaagaaatgaaggcacagcctctcttggatacttatttaaagctacattcagctaggatgtaagttggccagaatctgaacccagactttctgccttttttatgagcctttaaccacaatttttactgccgctcagtccagtatgacttctaaggtaattgatttttaggtttgagtttagttctgcaataaaactgtggactccccacggatgccatgcatgtcttatatatctgtatcccctacagcacctaacctcagagctagacatgcaataggcattcaatataaacttgatcattcattgattggccagacagctccctgacttgagcacttctctctcttcccattatggaaatgtctgagtaatacagctctcaaggaagactgggggtggggggtgggtgtgaagcgggggtgggagagcatagccagtttgtctttaggagagtctcgtattggactacttcaaaattaaccagtcagatgtctattaagcatgtgctatggcataccacacacatggaggatgagagagaaggaaaaacattcctgttacgaaggtggcaatgctcagattggaagaagctgcaccagtgcggtccagcagggcagcccttgactgagggcttggctgtgtggggcagagtgtggataagggcgttagaggaccccgtagatcgatgtgggtcgtcagcaaggctggagagggctcaggagaaagtgtggctggtggggctttgagggagggccacgtcgccctaggtggagagcaaaggagggctgggagaaggaaattgcccctgattcacagccttccctctttggtgactgtaatggtggggctgggattcatttagccttttctcccactcctgatgactactaagctctgatgcttgctcagtctttcttacaggttggttaggagggtaaagtgtaggagtgtcatatactataagcccggattctatccacatgtaggggccgatcattatttgttattgtctctgatgctgttagtgccctttcttatcctctcagcagcattcaactctactggcagtctgcttggggctgctataaccgaataccatacactgagtggctgacaaacaacagagatttacttctcacacttctggaggctgggaagtccaagaccaaggcactggcagattaggtgtctggggagggcctggtttcctgcttcatagacagctgccttctggctgtatcctcacttgctggaggggcaagagagctccctgaggtttcttttataaaagcactaatcccattcataaagcctccacccttgtgacctaatcatttcccaaagccccaagtcctaatactcctaatctcatcaccttggagactaggtttcaacatatgaattttgaggggacataaacattcagtccattgtatctacatagaaaaagctgtttgtggtgaacatgggtgaccctctgcctgagggctttttttttttttttttttctcctagcaggacatggcagaatccctgggtagttaatgcctcaaatgcagccctcagccaatgacagagggaggtgggggaatgaacacccggcttccttgccccttggtggggatgatgctgagggctattctgtacaggatgagacctggctgccatactcatgacttgctggataaggaaccgttgctgcctaccttcactccctgtcttcctgcccactctcctgcagtgtctccagggatcacctctgacatgagttactggcactggaattgcagggtctatttctgggcgactgaaagtaggacatggtagtctttaataattgaagagatatgcatatttggtgaatagataaattcctctaattgtacaaatgggttcagctcaagtctagtaaaccaggtggacccatttccagtgtctagacccagccctgtcatgttgtccatgttcacagggagctggctgcatccgcctcagggtgctctcatcatagtgttcaacttacacacccctgacctcaccccactcccaactaggattgtaaagtcctggaaaacaggggccttgccacactgagtctttactgtaagaccctcgcacagaataagtgttcgctgaatcactttctaattggatccagttaagcagaagaaaactcccctctgtgcaaaggcaaagctatttccagtgcctttctctggcttccaaagtgatgaaattcagttcccaaggccacagtggttcactagaaccttgtaatgggttcattatttatcctgttgtaccacccctgagtgacctttcaaatggtctcacaaatgtcctttccacaattcatttcaaatgcccctaaacagtcctctaatcttgagtaaagttcattgggcccatgtacagctggcacttcctttgaatcaggggcccatgagcactgtgattaatgaccaggagtgagtgtgggcgagtgtggggcacagggtcgtatgtcctggggcagggctccctgttcacggtctaaagccacatcctgtctgccccaggctcatattctgccagggaccacactgaacaccctcctcaagatgccagggctgcctgtgccatgtactgcaagacagctgggattgtcatggacatcaatatgaaaggcagtgcaggagccaggctggattccaatgctgtggctggctggaggtcccatccagtcaagtggctcgccacttaggtctgaaccaaagagctaaacaggagctggagagctctccctgaagcttccatccctggcctttagagaccgaagtctcctgaaaggcaggtccttgcaagaggtaaaaggctcagtagaatgcagcttcctggcccggctcccatagtggcccctcctggctccaccataccctcaccatgccaggcttggcaggccccaaactggacagacagaagctccctccaacctcgtttccaattccactcatggccgccatctatttgcacagctcatctgggaaggcagcagtgataatgtgagcaggagtccaagaggtcacgaggcatacccagctcctgccattacagaggaggacagctacccagagcacactgcccctccccacttccagtgtagttcctgcactgcccctccccacttccagtgtagatctgggcccctgtacatgtggcaagacctggaagtgggttccctgcacagaaattttctgcctaccttacagaaagactggaccaaaactgttctacatggccacaacaggcttggatctcattgctccagagaagcaggtctgcccatgccctggaagctggctcagtttgggctctggagccaggagcagacatcaagagcatccacggagcctcttttgatgaaaggagcagatgatgcgaaatacagtccaaatggactcttcggaatcagttcatccctcaaacagcggtgtactgccactcaaagcatgccgaggacactgccgtctgctctgacacctgagtttgagttgtgtgtcctttggaaggaagaataagcaaaaataagtgactccccctcaccgctcataaagaacttctaagtctgagtggggagggacatgcaggaccacctttgagagaaaatcaagaaggaggccctcagcacaaatggcaggcatgctgggttgtttaggtcctgtttcatgctacattatgctgtgtgactttgggtaagtcacttaccctctctgaatcttcaaaggcttcatatttgcacaaaactcttccacacttcacagagtttgaaaaaccacaagaaagaaaggaagaaaaacttttatccaagagcaggtatgaggcttctgaataaagctgaaagtagtcattctcctggactctttcaggagagctgagttaccttgtagatctactatgagaaaacctggattattgaggggcaaaggggctttttggtcatttgcagtagcctctcccttgaagaagcaggaatcacccttgtggcatttgtttgagcatcttcatgataatgggcagaaaggagcttgtctttcttgggtcaggagcagggaggtgaggagtgatcagaggagacctgagtctggcactgaaaccagctatactttcatccaacacatttcatcaggtcctgaacactgaagacaccagtgaacaaagaaacccccagtgcctgtcttcatggggcttacatctgtaggacaccctgccatcagagagtggaagaggaggtgtgactggagtgactcaggatatcctcctgtttcaccacagttccctggactttgtacttaatgcagacagtggctatgaggtaggaaatcagcagagcttgttttcccagcagtggtcacaacctgggttgtcaccttgctgattggagcaggatctggtagaaacaaggtgcagtgaacaagctggccaaaaccagcagacagtgatgaaagtgacctctagttgtccttactgctcattaacataaaaagatacttctagtagtgtcatgacactttacaaatgccacatcaatatgccatggcaatgacctgaaaattaccttgtatggttccagaaactccctgccccttttctagaaagatctaagtaaccacctcttaatttgcatgtaaataaagggggtataaacacagttgtcagcagcccatatgctgctattctgggcatgggcacggggcttatggggtagccctgctcagcaaggagcggctcccctgctgctgctgtatgctgccacttcaataaagttgcaaactgatttctttcaccatcatctccccattggattatttcctgggtgaagccaagaaccctcccggactaagccccaatttgggggctcacttcacctgcatcatttacatcaaacagcccctctaagggaccttaggccttgttatctttgaaaaaatgctccagagtgtctatcttttctttctctgtctccctcctatcccaccccatcctgggcttgttttcatctttgtcagtgtgggtactttcctgctctgtgctgccagaatggtgctgaatatgaatgagaaagtaaattagatactgatcagctctccatttccatagtgtgttgaataataccccatgacaactggggtttgaaaggtagcccagctctgggagcaggcctcctgggcatctaagtgacggccactgttcaccagctgtgccgagttactacacagcctggaggtcaagtccttctcccataatcacttggatggaaaattaaagcagcctgctccctcaatggttatacattctggcacagaaattaacaaattcccccagaatccataacagatacatctttgttcagccaaagaactttgatataaattgtagctttttaggacggctctgtcaaaagtgtaatatatcatggaatagtgaatacaagttcaaaagtacatataataatataattaagatagcttgacaagaatgtattttaaaagtataaaatacctgcaggtataatagcttcataaagtctgtcagatttacttctgctgtgaagaaatttaaaatgttttactttaatgtgatgcaaatgaaggctgaggtatgcatataacacagtccttaaaaaataggtagagggaaaagaataaaagtcagattcaggccaaacaagacattcaactttgcgggtgactggataatagatcaagcaaacagattggggagcgatgccgggctgtttgtagaaaacaccaatttcacatttccctcctttgctggctgcaggaaagtatgtgtttttattcaaaattaatgattccctttgtgcatttttctttttgctcacaagagtcaagcataattcttgtttaaagcaaaagcaatttttatataattactagctcatgaaaaattatttttcaatgtattaaaagctgaggagaagagtgggcgagtcataccctgcacacacatgtccggaacacctcaggtccacaaagaagagctgcctccaggtgaacaggagtccaggcatctgtccagcctcatccatacactgagcaacagtatccctcacttggctgactgggtgcttggacaaaaatgctttttcaggcaaagaagcagtaactgcctacctcgtgtacaagaacaccaacgtatggaattacaagattaatgcaatcagcagggccacatattggggcacccagaccaccttccacttctaactctcctgctaaaaacttttttttccaagaattctatctccccagcctggtggtttgcaccgtcaagacaaacccagtaatgtccacatctttgcacctccccttcctgtgcagatctgatgtactaaggtgatgcaaaggcacctatccccaaccgttacttaaatgaaaccttctggcctgatagcatttgccaagccttcattgctttctcattttctccttccccattggcattagatcgaaaggtctctgagttagctagctacctggtctcaggaactctcctaaacttccccagccttggtcatggtttacagtagagtcaaaagtcccttcccttgagacatggcagaaaattctgatatttcagctctccaaccatgcttatgagggtaggtgcttgccaaagcaaaaaagttaaagaatggagtggggagagccttgcaacaagaggcatctcttattcagggtaaaaattagaagcttgaatcatgaaacagtgtagtttaaaaatcagcactgccggtgcctgtgctgctgatgactgcactcggaagaattttcaaagtaaatgtacttttcaccattatctcactcatttgcattctgctccatttggattctgaaactcaactggacgctttattttcagggtaggtctgcatgatggcaaacaaacagtttgggaaggaattagccatatgggcctgggcattattttcttaatgtgggaactgggtcaaccctctacaaaatgtttcctcaaatacttaaactggcacactttccttttgagaggggaggtttttagaattaagcatcccagttggctgtgcgtggaatggtggctgcatagattccagcccccagaggctcatgaaacatcaaaggtgaagcaacgtcagacacagcctggtctggcctcctcattttctgactaagacatacaggcctagagaggtggagacctgggcaagatcatatagccaaggaccgagtccatgtcatgctcccctgtgtctcactgccctaaatcgggagaggtctgtgtctgccccttccttttcctccctatgtctaagaacactcgctgtcctgtagggggctcctcatctccatgtctgggccccaatccattaccccaatcctgtgtgattttagaggtggcaagtgtatatcaatcaatcaatcaatcaaccaaccagtcaaccaatcaaccaatatagtcttcagcacaccctccatatatgaccttgtgtccaaagcgtaggccattggctcattttctccttgtcctttctctgttcttcagaaccagggacaaaatgaaaaaaaacactgaagagaccccccagaaaccactcttctcccctagtgaaaaacgagagacataatgtggggaatgacactgtcaggggtgtcacaagtgaaggataacaatatatgaaacagagcttttaagggtaacccattatttttgtaatttgtttaaacaaaactgagtgactctttaaactctaattcacatcttggaaatgcaatgcagctatctcttgtttctctctctggagtcgtggcaataattttaatgccagcagaaggcattagacattagaggtgagcaaggcagaggagtctggcttttatcagataattaagatgctaccaaagtcaaacctttatcaacattagactaaaaataaactccttccatccagtgggctttctagcaagcattcaaagtgacagtgctctggataaggttttgcttttaaaaattgttcattgtttttcgacttttattggcaatccattctcattatgcccaatgcatttgtcttcataatatgtacttcacaattacaatatcaaagagtttgtatctacataataaaaatgatctatagaatagtacagggaaaacataataacacagtgtgattgttaatgaaatgaatactttgagggaaaacatggcatcccttgagagaacttgttcctatatcatgagatgctagaaacaggcaaaggctgggaggtgaaaccgaaattgaatctcgggttccctggaggtagggagtgcagcatggcactgcttggctttggtgatgggaggggcacaggaggggtattggaggtgacctattgttggaaataatgacttcaaagggcagccgtcttctactagctcttcagaactttctggccccaatactactagctcaacagacaactgaaatgaagctcaggtcttttctctcaagaataagcattggcaagttcttttcatggaccaagatttgctgcggctgacctgcagaggtgctgttcaggaagaaacagatctgctggaggcaacgatctctagactcagtttctcagcctgaaggcacggactacagaaagggaaaatgtggagaagcagatagcaatgtggtaaaaagatgcttggtgcccatctggataatttcatcctacagcacacccagggagaaagaagccacatagctggcaagtggggacacactgtgctatccctgctcactgttgcacctgatacacctatcctagtgcttggcttacagtacatactcataaatatgctttttttttttttttttgagatggagtcttgctctgtcacccaggctggagtgcagcggtgcgaccttggcccactgcaacctccacctccagggttcaagcaattgtcctgcctcagccttccaagtagctgggattacaggcacctgccaccatgcccagctaatttttttgtatttttagtagagatggggtttcaccatgttggccaggctggttttgaactcatgacctgatctgcccgcctcagcctcccgaagtgctaggattacaggcgtgagccaccgtgcctggccataaatatgtttttaatgaatacaaaaagaatgtcttctttatggagccaaaattttcacaattgataacccttacagtagattgcagaaacctataagacagactatcactgaactcataaaaaaagagttatattactgggcacccaggaaaaggaacaacagataaggaagaggtgcaagctgctgaggtctgcataagaataaaggttggttgtggcgcttggccaaagcagggctggggacctcttgcagggcgacgaggagatctgacagatgttccaaatgagaaagaggaggacaagcagacgttcagctctgttaagagaccattgattgaggagcactgttatgcctcttagttgacagccagtggcacgaatccactggtgagaagagttctcttctccagccagccaagagctgcattacatctggaactgggctcagatagcaaaagagcgttctatatatacatgcattttcaaaatattgtggcttctgtacattcaagttaaatgtaagtcaggttgggcagggtttggtcagtaacggggcagaggaagtagatcatttggtctctgaaacccaagcagtctgtagtgaaagtctgcaatcctgcaatggaaagaatctctttcctccactcactcacttccctccccaacttcccatccacacctatatggacacaaggtctacctccaaaaatgaaattcattatatttagagctaaaataattccagaatcaattgacgtagatgaaagcatttttgacttggcttatttgaaaaattatcccgttttatcaattttatttggctagcataactggtgcatgtgcaagtataattttgaacagggagagaacttagttgaattgtaactaaaataattctgggcacaggatggtgtataaaaatacaggcatgacaggaacaatgtaacagagaaagtgacatacagtagtatgtaataacagaagtatcttgaacctatcatccacatgttttttgtgcctgaaaaagcagaatattattataataggtgcaaaaacagttgcagcgtgttaaggctggaactcccccctagagacatagtccaagcttctcacttcaccaatgatgggacctagaatcaaagatatggaggtgactcgtccaaggtcttagaagtgggatgaaaacctggacaccctaggcttctaactcagtgtttttcaattctaccctatggcctttcattcacagagagataggcaggtaggtacgttgatggaagacagataaatacttattctccaggtagtgtcagcttttagacaaaattattctgtcttcagattgaacatcccataagcacatcaaaaactccctgtaggacatttaaactttactgcagagttaaaaactgtggagagttaaaagtcccctgcagctattaaaatagtgtgtagtgagaacagttgtattacaggtgactaatggggtctcaccacctcccacccccattagatatatatactgttgcatttctaagcaagatgtccagtatttttactcctgggggagggagcaattgctgactactatttttttcaaaactgcactaaaactttcttttgtaagaaaaacgagagaaaaaaatcaatagagcatgaaaggacatgaaaagtgcattttaacccatatataatttttttctaacagtgcgattttttaaagctctctacaaaaaataaaagtcaatgtgattctcaaagaaaaaaatgcaacacaaccctgaattcaggagcaaaagaaaaaaaaaacaagaataatgaagatctaaagatttgacctagtaatttgaggcacagatgaaaaatggtgtaagctctggccacctctgggattggcaggtcaaaggggtacattaaatgtgatgggaaacacattctgtttttggatagttcagcatatatccatattaaagcttttaagcctcccaactcagtgaaattactccgagaaaccaagtgtccccttgtggacctggccacacttctattttcgtcctcaaagagaaatggtgtggccaagaatgtgagacatccctaacagggctcaggtgaaaaggaaaggggaaaaaagagtgcaggttaaatgcaatattaaagacgatctctctcctaatcagtgtatctttcttccttacagctaagcaatctttgtcaattacagggcattactctgcaggccaaccggcaattacaatggcatctttcttcccatcactgacagcaaagggaggaaatagtctgagtccagctaaatgtaaagagggaaactggagctcatcacggaggtaatgtacagggaacctataaccaggatgcagatgctatatgcagctgttatgcaaagaagctcttgctctcagagctgatgtgtttatttagactagtgctgaggctgagttaatgccagtttccagaaaggattaatatacactaacgtggaattactgaaccgtcacacacatctggaaatgtatgtttcaactctttcttttttgtggcagccagctgtaccggagaagcagctgatgaggttgcagttgctcctgggccccagctgatttgatgtcatgccgttaagataactataggtccttctgatcaacaccatggtcctttctcccctctgatcctttcaccactcctctttattttggtctcacagtgagtttcttaccttcattttcaagtccaggctataatctcttccatttctcccatttctctcacctccaagccactttccatgtagccatgaggcctctcaaaagaatggagagatagccttgatatttgtggttcagtcatttaacctttgcacatttctgagtgggtcatctgagagaattatcctttggccaagagaccacttagaggaatggtaaaggacatctcaaggagctcaactggtcttatgaccctgaaccttctgtctccagagacaaacaacatcatgcccctcactgagtggttagcctgcttttgtgctcccatttcagaacagaccattcccccaccaccccgccgccatctcagttattcaagaaggaagccatggtatgtactgggaagtcttgtgcctatggaaattccttgagatagaaaagctaaaggcatgaggtattgtgaaagcaatttggctgccctacttctctctttcctttctctgtgcctgtcctttcttggatgaatggattagccaatacagatgtgcgaattatccttaagtatcctggaaaggctttgcctatttgaccttgggtgcggctgtaagtgtttgctcatcagtaattacaaagagcctggaatctagaagtaccttcccaatatcaaccacaaaagcaatttctagttgaagattctgctggggactcttcgacaactgttttctttgacccactcaccccaccttttgcttcttagacatccaactgttcagaaggatcccactgagagaacatcagtcaaatcgtcccttcgtctctggttccaaagtaccctgcaatcatttgtgccttcctccaaaatacctctttcactgccacatcagaagagctctttaaacgctaacaagaaccaatattttagattctactgctaggcatttcagctcaagtcactttattgtaaaattagatgtcattgtgaaaagcatggatataaatataagagcaaaaggcccttttcttaatgcagaaaccaaggtaacaatatcctatttttccttgttgtcaaaagttgtggtttttttttttttttgatagctcagccaatataatgcactgcatgtttacacttagcattaaataactattatgcaaaagtactccacagtaaaatctaagtatatttatggaaagctaaattatattgccaagtttattttagaccaaagaagcccctgggaagggatattgtgtattttaaagagtaaatgtaaactattaaatagaaagaggctttgtggaatgtaacacattctacctaggtaaatcacagagcaattacacagtaaacttttctttgatgaagcactgaagtgatgacatgtaattacttttccaatgctgtaccgtgtgtttatcaaaatgttaatgcaaacataataacaggctgtatgtttgtgctgagaatgtcagagccatccagctgtcaatcacatctgaaaataaaatcgcaaataagcaggcagcttgataacaggagtgacagccaatagtcactctgctgacaagtactttgctcccctccaccaatcacagtgtcactgtaacgtacctaataggaggaatatatcttttaggagctggaatgaaaccaagtggcataaatcggctgaactttgcatgcgactccccctccccctctctgttaatggggcttctttttggggccagcagaccccattccctctccccacgttccttcagatcagtgcccttgttaaaggctgcagagcccacaaacgggctggcattgtgaaaactcaattcagaccaggtctcccagccaactggcctggtttaatcagtcagcgtcaagccctgcggtactttccttggtcatggtcaccaacataggaagtcccagcctagatctgtcgcagccactggctgagctagtttttcttaaagctcttaatgcaattaaaaaaatcattttaatattttttgagacagagtctcactctgtcacccaagctggagtgcagtggtgcaatcttggcttactgcaacctctgccttgtaggttcaagcagttctcaggcctcagcattctgagtagctgtgattacaggtacccaccaccatactcggctaatttttgtatttttagtagagatggggtttcaccatgttggccaggctgatctcgaactcttggcctcaagtgatctgccttcctcagcctccctaagtgctgggattatagatgtgagccactgagcccggccaatgcaactttaaaaaaccgaaacaacaggtgtctgattttaaaggacaagtgccaaaactgctagggaatcagaatgaactaattagtgcttgcagggatacaaggcccatttgagagccttcctggggtgcatgtatgtaggggtgtgcgtatatatgggtgtgtgtgtaggggggatcaagccctaaataggcccctgattggtcaggtcttttcccatgatcatttccttgtactctggaacatctaggaaatgagcagttcagtcctggaaactttgttcaccctgactcctgccctcttgactttctctgagaacacttttcactgaaggatcctttcaaatgtatctaaaaattgccaaccacttgttaaagtgtaagcaggtgcatacatctccttctcctttagattaatgattgcagatattctttccagtatggggcacattttagaattttaccttgctgtgtgcagcagggcagaagaatgggcctacatccattgctgaacctcctctttctatccttattgttacaaaattcacctccttggttaactgaactagcaacacaaatcatccctacctatttgcattttgctgttacaaaatatagagatggtttgtccaccctgtcccatgcaattgtgaccaggagaaacgctctggctcctggtacaaagagatagtctggaggcatcccagtagaacgcagaatgcagggaggaattacgtccctcaatcctctggtctgcagtaatcttatttccattatttttcatgctttctggtgctgccaacaaatgttgcaaaggcaagagccgatctttgacattctcgactgcctaaagtgcagcaaagagctgctttaatcccccttttgtgcctgcaatgactagaagaaaatttttgatcccatgcttggactgactaatggtgcattttgagtggcagccttccacttctgcagaaactgtaaaactcaaccaaacctggaaacatttgaagtttctgggttcaagaaccatgggttcagagaccctcacctccatgaatatgacttgttggacattcaatgactgtgcagtagagacaacaggggtgagtgtttagatagacccagtagctctgcctgctgagcccctctgccagtactctaacttcaatggatgtgcatgattcttccgttgtagcaaatatcattgtagtaaaaagtaatacatctcctcgtttaagtgacagcaggtagggtttgttactttaattcactttgcctttctcttctgaaaattaattgagtcagatactgaatctggagcctaactccttggcagctgagcaggagacaggaggatcatcatctgctatagagagttcttgagaagccaggaatagttaagaggaaattgaggcaacttggaaaggcaaagcaggtcaccagaagtggtaggagagagatcttcaagcagcacagcagttaaagaactttatagcctcttcccaacaaatgctcattgtcgcacttcctgtcacctctctctcctgcatccctctctatctatgttccaggcacacgggactttgcattacttccaaaggtcatggtcaccgtcacaatttccatgaccttactcatgctggcaactctgcttgaaacgtccttaactcatcttctccacctggaaaaaatccaaacctttgatgaagtttgggtaaagtcactttctgcagtggagaatgctccaggaagaatgtattgttcttacgtcagcactcccataaaacctctattttagcatttacttccttacacatagactttttccattcccacttcacactgtgaggatctcctggacaagcattagtctcagaacttatgtttggaactcttacacaggctggattttctaaaagctactaaaaaaatgcttgtttgaaattaaagatccaatgttagaaagtatgttatattaaaaaatggccatcctatattacccagaatcaaaattggaatggagaggtggagacataggttttgaatcgatacaaagaactttctgatcactggagcagttcaacaatggaagcttctcaaagacatgagccccctgttcctgcaggtattaaagtggagggtgactggccacccggggagattgacaagtgattgcaatgatccttatgatgcttttcaatcttaacactctatgaggcattgggcctacatggataagtaaacaaaattgttcaagtctattaattagaaaaagttctctagtaccgtggttctcagtgtgtataagattcacttgcagagcttgttaagaagcctgggtccacccgcagaaattctgttcagtaacatggaggtggtcactgagaatctgcattttaaacaatccctccagatgactctgctggaagcagctctaggattgtcattggagaagcatggttctagagtgtgccaatcgatgggcctccctaagccctctgttatttaacacatctttactcatgttgacataaagtcagcccaacctgcaggtatgtcccaatacatgtgcattaaaaagtttatactctgggctcaaagttcaagcacagagagaattgcaaatctacaaagcgtgaccgccaggatgaggggctatccctgggaaaatagctaggagaggtctgaggaaggctgactgggttcatgacagacacaccacaaggggaggcaaggtctcacctctctaaagtcaaagacaacatagcacgccacggggtaaaatagcaaatgcataagcaagcaaggatcgtgacccaggaaactaattaatcgattcatcaaatgacaggttttgaggcatcttctagagaaatgagataaggagatttgccaagattgtggaagttctcagaagcaatgatgtcatctctcggtggaggctaatgaagtggaaaagcatagcaaccatctttcagtacagagctgcagtggtgagtagatatcagaaatgcaaccaatggttgcttggcaatggaatggcttccaattagacagtcaacacatgacagagtctgcagaattaaacttcatttggagttgaaaacttaatgttgagtgaaaaggcaataggttaagagatttgtgtattgtattttaaacataaagactcttccacaaatccaagttaatagagaaggcccttggattcagattggacagtggtaggaaatagggttatttcaaagaccttgcatatgggagaggaatatgatgcccacagatggccatgggtactatattctttattcttggacaacgacttacttttccattttttacatttcagctttgagaaagatcccagatgcagggctgtgtgaagtcaagatgtttcaagtgtaactggatcccaaaatgggaacacagtgggaagcataaaatatcccagtatggtgccatcttctacagtgtccatgttggcttcatgaacaccccagagaaagaaagacagcaacatgaaaacatagagtatgttctcaaaatggacacttggagaaattttcaggcgtatgtttatcaaatgcatttggtttcttaggaaagacaggtttagtacagataatcctggaatcccagcatccctaagatctatttaattttcgtttgcattgtttgtgaatacaatgatcatatcaatcatcattgtcaacctcatcatcgttatcatcatcaaagttattctctgagaaataactgagaaaaagccagaaatgctgaatctgccttatttttttctagcaggtaattctttcatggttactgggcatcccttcttttctgaataagagagtatcacttagctgaaggacagagcagagggcagcaggctggctcccgagctaccttaggttgtatgcctcaggcatgccccactgtgctgtctaattctagggtactttgggctttgaaagaggtttcacttttctatttggcaacaaatgtttcatctaaaaaagtgtgaggctcacagataagcatgattttaccactgtctacattaactgattatgggatattgaacctaatcagtaaagataagaaatatgactaagaaacagttttctttcttcccacatttaatgcgttcctcactttaattttgcattctcatctgctcttctctagctcaatgtcttgactcttttccactcttttctctttgctgtgctttgatactccctgcccacatgacattcctgttagtcctagtgaagaggctaagtggttttgacccacgaatacttacagatggtgctgcaaacccagctctgaggatgcaaagggtgcagaaatgtctcaatgttgggagatagccctgaagtgtacaaatcctaagtatagctccctgcatgatgataatggactcactaatatctattttcagcagccccacactgcctcttcggaatctctcctgagggctaagtgcatggatatttcattgactggcttcatttgtactgcctcagccccactgtatctcctaccagcgctaataaaaaaatatggctcattagacaagaagtgggctcactacttcttgtctgggttaactttgttcaccaaagataaacttcatttttaaactgaaggtcttctgcctgaaaacacagccatgttttgtgctacattccaaaacaggtgttggataattcagtaattagtatgcacatctaacttcatgcagcctctgttgatctctcaattatagttagctgggtcctctgaagttttctgtagttaattagagcattattgaacagttgggatggagagccaagctctgcaatcagttgacagcttggtcccatgaactaagcattgggctggtccttgactggggaatgacagtcttcagggtgacccagtgccagaatgggttagattgtcttttgaataacagctggagggaggcctcttttatgagctgagaataatggtcacattccttattctgccccactcttgacaggaaaattcacattccaatggtgatcagtttcagaaatgtctcctcaggggaaaaaggaaactttcaacattcaagaaaaaaggataattgttctgagcaggctccagaaagtcaaaacctaaggtgaacacgtgagttagtgctcagtctccctatctcatatggtttcaccttgactcccctcccagaagaattcaggaaaagcacagggggacagcaggaaggtgcatgaagggacccacatgagatgcactgcacaccaaattctagaaggcaatttggaaatgattgcttctgaataattgaggtatcatgtcatctgcaacatccgagtctgactgtccaaagctcctgataattgcccaggttccattttgaatgcagcccgtgagtattagagcaagcatgcattcatcactttaagaccaaaagacaagcatgtcttgtcagtggaacggaggggagatgctttggggactggaggctaagaagcaagaagcattactgattatggtcatggtcagcgtgctttccaaggagaattctccccgctgcccaaatttagcttctgtgctgttctttttccaaatttatgaagtcagaagggtcactgctctctcctcagcaagttgtgaggcatgttgttctgtaacccacccctcactgcagggatctgggctggcttactgagtaggttttcatttcccagcctctcctctctcccacccccaccaaccaagggtccccaatgtggccaagaatgtaaagacagcagaatgacacacatggctgaaataatgtttagatttaactaaatgttggaaatagaattggtacagtgaaaagaaggctgcctttggcaggatctcatctctactcaaccgctgagtaaccaatgtaagtattacttttctccatcatattagaaaaatgaagataggcgtaaccttcagaatcagttaaacataggtgaggtcacctgtctccctggggatggaatgagacagcacagcacaggagagagggggtgggaacaggggtcagaaggtagaagcttgattcctatctctcctctttgctcagtgagtggtcttgggcaaatcttgtattaatgtggacatcaattcctttaaccataaacaggaatcaataggacctatgctatacacccacagtatcaaggggaggactgaaagtaaaaactactgtgtgagagtactttggaatctgcaaagagtgatataaacaaacatacagcacatactggagtgaggcaggtgtgtgatcaagtgggctgaattgattgccaggaagcttgggagaaaattctgagagtttgggacactagacagcagccacaaaggctgacatcagacaatttacaattcagagctctctggggcctagaggagtctttgaagtgagggagctcagttcagctcttctacctcaatcccactctgctgtgctgtgaatttaaagggcccgtgccagattctcaccagggcccgtgccagattcttaccaggctgcctacaaatcagggaagagcataggagggcgcaacaaaagttctaggacttctgtcttgatcaccaccccacactgctctttccttcattaatcattatttataaaggctagaccagaggccctgaatcaggcactagactttgccaagtcccacttatcttagaatgtgttgctaagaccctcacgaggccctcccattccaagatgtatcatttcaggattccatggttcccaatcagaagttcattaaaaagatagtaattagaccaggtgacgccgctcgaggtttactaagtgtccttcagctcaattcaataaacattgcagactgaccgtgggcaagacaacagaccaggccctagagcagtagcactgacccatttcattgtcgacagtgattaaaggagatgaaacccatttgtgagtttatgaatgtatacacacctggattgctggtgctgttgttttctcatgttgatgttcctaacactcctatggggtgggcagggaaggccttatcattcccattttacagagtaatccacagtccacggagattaagatcccatacttagataaatggtggagccaagacttacccaaggggtgtgcctgtgttgtaacagatttactgaagtatgattgcacacaataaataacgtcgttaaagtagtatacaaggtgaggggttctgccgtgtgtacactcatgaaaccatcaccacgatcaggactgcaaacacgtccatcacccccaccaaagttttctcttccccttagtgacccctccctttttccctccccctctttattctccccctgcccctcaagtacccagggatctgctttttgtcttgaaagactagtttgcctttttaaaaaatacttcatataaataaaatcacataatatgaaccttttggctggcttctttcacttggcataattacattgacattcgtcatcattactgcgtgatcagtagtccattcctttctactgctgaggaatatcccattgtgtggaggcaccatgatttgttttggtttgatgtccaatgattttttaaaaattgttcttcttggaaaaaaaaaggagaagaaaaaaagtcaattccctcttctcctcccagaactctaaatgattaccactcaagtcttgtttctcaaatatttcctggttaaatggacaaatatattacaggccacatcagggcttctatgcacagcttcgggaagaatcagtttcagtacgttttattggaacctgcacattgagacgacagcttctttgcttgtagacaaggagaactcacaaaggcataaacaatagagaactttggaaaaattatgagagcaatttaagagtggataattagatatcttttgcagggtgttagggaaattaaattagctttttttaaaaatcaaggtttgtgggaatcacttcataaaaaatatctccgtgactgattatttttctaacattcttcgcctttcttccttgcatatccaaggaagtggcacttttagcccttagctgtggcagccaatcatagcctctaattgcattcactgcataaattgtcagtgtcatgaataataaaattagtttaaataaacccccagccacaatcacaaataactatctggtggaggatcttgtgtcctttcattctagggggatgggtcagtgcaatctctgtagttaaattcttgagttaaaatgaagataaaattattggggaggtggggatagagctgaggggtgaaagtgggaggagaatggtttctggctcccggcaggttcatgaaagagaaagggtcttcttcctgagcagccttccgagagtgcctcatacctaagacagtcagccctgaccagcaacaatagccgagaaagggcttgtactggccatgccagagtctagagggaagagcttggggctcagagactgagcagtcctgcgtgctcctgtggtggcctaatgtgacctattatccagcaactcccatctatttctgaaaactccacgtgctggtctggcactctaattgtccaatctgctgctcaattttcaacaggatctcatcaagcactttgccatttaatggtgaccaaatccctccagttttctgctccctggctgtggacagaaggcacctggaggggtgctgtgggagtcccgtggctgcacatcctggcaaaaggagttcatttcgatggccaagcagcttctatcagcttttctctttctttacaggccctgcccaaatactctgccttctgtagactctactgaagccactagggtgagtgagagagtagacgactgcaaacatgagcgtcccccagtcccagcaccacagcggcctgcctgtgcccagcgctgccccagcatcctcccaaccactgtcctcagcattgtttcaataggagtcacatgattttccaaaacacaatcccttctttcaacctgagcctcagctccctgatatgttaattcccaggctgattccagtgctgttggtcccccgcttggttcattacatttctgagcccactctgctgcctttatttaatgaggtttattgtttgtgcttagtaattttcaaaggcccatcaccctctttgagtttgcccttagatcttcagcctgccaaagaggtgggcttttgaagctacctttattaattcagtacctagcttctgcatttaatggcacatgggtttgaagtgtacataagccacagtggaaacatctgagaagcgtcccaagatactgcaaattataaagggtgattaggaaatagcatggctctctatcttctcatgccttagaactttattccttatatcaaaaagatcctgggatatcaaaatatcactgtctgactctgataatgacttcccagagtttcagacattggtggaaaaaagatataattttaattatcagcagctccacttaaaaaaatcttcagctattgtaaagggcaaggagctggaaggaaaggcagaagaggaggcaagaggtgagcccatgtcctactaaatgcctgcaaagtggctgtctttgagagcgctccacagtccctgccatggatggattccttggaaagagatgcacagggtgctccgactgttagtctgtcctgctatcactatcactgtcagggagcaaacggcagaagccagtctcagggaagccagtggcctgacagttaaggcaaatgcacagacttcagaaatcacaccaaagcagcttggcttctaagatgcagccctgaccggctgactcaaaggaagttggctggcaggttctgcgatccctggagatgggcagggctggggtcagactccggtgacagcagcagtggacacaatccaggacttcccagtgaggtctgtcttttctttgaaagggacagaggagtgtggtccttgggacatctagcccagggaaagaaatcttgcccaagaatacatatgaatatctgcaaaaacaaagttggggtttgatatctttcaggaagcctaggaattctaggccactgccagcattgggaatggttggctcccttccccttccttccatgcccagctggagacagaatgctggactctgggtgcctgaattctgatcctggctctatcagtgtctctgtgcaccagagagaggccacttagcctcccttggcctcaatggcttcttggtgatcttccaataatttttagcagtagaagctttcctttcctaattgaaattttacagggaacaatatttaaaatagctaagaggggctgccatgcctgagggtggtccctgcctgctctgttttcttcatccccttcgtaccctcctgctcagcagaagctgagggactccaggggaccccagccctcctcaggacccaccgtggaagcagaactcccaactgtctttctcactgcttgtggtttgtaagttttatgactcgattttaatctgtaccatttaggatatgctcaggaggggccctgggagaggcacaagtggcagcttttttttcttgaaaaatcagctattatttatccttaaggaagaaaaaaagcaaccctgagaaaatgattttcttttcacagccttattacaaatgctgagcacagctagaagtaaggcctggctctgtgcacgtgtgtgtgcatgtgcacgtgtgtatgtattatgtgtgtgtgtttccggtgggcaggtgtggctggaggcatgaccccttttctctggttgatttcatctccagtagccaagtagaaactacagcatgacctgacttctatgcccccagcactatggccatgacagcctccagataggagaagggtctggcttcattgacatttccacggtagtgcatacagccctcgagacctactcaagagaggacaaaagagaggctcgggtagagcttatctagtggatgaacctgctcctagacacagagcactgcctggcatccctgctgcagaatcgggctaggatagggctgagtattctaattgcctgtgggataggatttcactatatccctgcacagctgttttcatgctgtggttggattttgacgctgtcgtaatttcccccgttgtttgatattctcgcatttacattaaagaagtacaggagaagaacagtgttcttgggagaagatttcagcatttaggattcatacaaataaatgcatggactgcccacgcttccctcacatccgtcaaacaactcagttaaaaacaccttttcaaaaggctcttctataattttacttcttttaaaaatagtgatggggttatgtctgatgccccggaacgtccgtcatgcattgattttatccagttcagtgccaggcagcaattagcaaaggtaacactaattaggttttacaatgtaatatgtgtccttctaaacttaagtcatagcattttaagcttctaatgattgcaaggtcattttgctattcttcataatagcagggatgctaatgagtgcatttggtatgcgtggggatgcccctgtttcctcctggggcttatcagcatttactggggacactttacttaatttgttgccgagctcatgacctaaacggaaacattgaaccggccacctgaaggtctagaagttttagactgtggaatcagcgctgtggaaggcccggctacccgggttaccgtgagctgatcatttgttttcctctggacttagaagctccgcatccaccctgtccaatctccttagctggccaatctccctctcccacgtctgaatgcacttaaatttgctccttcctgctaagaaaaatgttatcctattaaacgatgcgtgttataaataccttaacattcatagtttcatgttttaatcttgctgctagcatattctgggcatgcttactggaatcagttttctatttcttagattgtaagttctcaggaggcagattaaaaactcataagatggtctctgtaaaatgtctttcccagagccgcgtgtgacttggtatttcatgtgggttttagatgtggctgtagataatgagatggcgggtatgacagtgttgagattcaagcagcttcagcaggctctcccccagtgcagctggaaaacatgacaaaatacatttccactgttgacacgtccacctcgtcctgttggggtggccccccagggtggtgtgggtttgagagacattgttggggctcagacttcctgccttcctcttaaggaaaaataaggaagtgatgaattgaggggaatacacgcaaagtagagaaagctagggttgtcttaatttcatttatttgctgggtaagtttctactcacttgaagctatagtccaggcattgtgttaggtgtaggggtgtcgtggtgagcaagacaggtatcatccctgcctccagagcttacagcccaggctggggagtccacagtaggcagcaaatgctttgagtgattcttatttcaaatcgtgttaagtgctgggcatggtgcctcatgcttatgaccctaacagtttgggaggccaaggtgggcagatcccttgagcccaggagttcgagaccagcctgggcaacataatgagacctcatctcaaaaaaaaaaaaaaaaaaaaaaaaaaaaggaaaagaaagaaagaaagaaagaaagaaagaagctaggtatggtgtcacatacacctgtagtctcagctactcaggaggctgaggtgaaatccctggagcccaaggggtcaaggcttcagtgagccatgattatgccactgaactccagcctgggcaacagagagagaccctgtctcaaaatcaatcaattgatcaatcgtgttaagtataataaagaggctccagatgctatgaaggaatagtgggcctgatctattcagtggggatcaggagattcctaaaggaagtgatacttctgctgagctctgagggatgaccagaaatgactagacacacagtggagggaaagccattctaggcagagagaggcatgtaggagggtcctgagataagatcattcacagtgtattccatcctctctggggattttcaaggggagcactctgcaagagtcacaggattagcctaggaaagaccgggctttaaaacaaggagctcccaggcacagagattcttggttctcaaatgttgcagcctgtgacgattcctagtgcttcaggatggctgcttccccacacggagcttccttcttgtgaaagcaagaagaaggccgggtgcagtggctcacacctgtaaccccagcactttgggaggctgagatgggaggatcacttgaggtcaggagttcaagaccagcctgggcaacatggtgaaaccccgtctctactaaaaatacaaaaattagccaggcatggtggagggcaccagtaatcccaggtacttgggaggctgaggcaggagaattgcttgaacccgggaggcggagattccaccactgtacactgcagcctcagcaacagagtgagacactgtctcttaaaaaaaaaaaaaaaaaaaggaaaaaagaaagaaggaaagggagaaggaaagcagagagggcatgagggaagagatgaaaggaagaaaggaacttccaaagcaatgctctgggacaagcctttgggattctcctgccatccttttaagggaactgaaggccagaacctgagagggagacattagttctaggtcttagacccagcaagggtaaccagacagggttactactgttctggttactgaaggctcccgtgcatggagtgttgcattccccagcctctggagctggtgggggttggagcttcacagggtcacctccctaacttcccctttactgctgtcctgagcctggttcagaactcattctgtcaggaaccccagtgaccacatgacccagctgcccccagtaggtggctgcctcagaccctaggcaataaacactccttgcagcactcacttaatgtgacataaagagaagaaactgcagcggtgttgtcactagagcgaatggcaaattctcatagctagataatgcagaaataaagtgcatttgtaatagacaacaaaaggattatcccccattcatttcaaagcaccttcatcccactcagggattacatttctcttacttatcttgcaagtagttttttctattcttgtttatccctgaagagcacatgtatagcttatagcaaataaaaagctggacctgttaaaggcaaggccttcattagtcagagagaagtcattctccaggactctgtgagttctctaatccactgctaggcagtaggatacctaagaaactaaccctataccatccaagacagaactctgctagtctgcaaggatgaacatggtccatgagaaatagcagcatctcccagaaaacctgagcaggtcaggggcttctctgactcctctccacatttgaccttggtctctgagatgctctttgtggctctcctgtatgcctgttgagatgcccatgccctttccagagctacagacaggcatgctgtcatcagacttccaatctttactctgaatgagaaaaacatcaaaatctgagaagcaggagagctaagggtatcctagtgaatggaatgatgatgcaaatatcctagaaagctgtgtagagaacgtggggcctgtccatgggcttcagtgcccaccatgcagtgcatgggagaccgagggaatggctgggactttaattcttttgagggccgttgctcttctcagacacccaggggaggggttccatggccacagcaagctctctggcagcctctgacctgtggagattcattctcaccacgtgttccaactctagaactatgtaactgctcagatcttacccaagcgcgtgttctcctctttcatagcttccattcttacccccattcacatatcatcatgtgcttcacacgcagtggggatcttaacaggcattgccatttcttttgcttgatatttctggctcctttcttttgttactctaagactttgcagaatcaaaagattctaagaagaggccagggaaagagcagaccatccaagtaccaaaaatccctagtaggcagccttctcctctctcttccctgctcttcctcttatccaagttattaaaatacgaaagatcatctcacgaatacgggctacaaacaactccacaactaaagcaaacccttctggtcaccctgggtcagaggagcacaggtggtcccatggggaagggcagcaatttggccccaggacaccaggttggtggcagaacctgctgagtgttttcccaggctggcggggaatctcatgaggaggagatcagtcctggaatgtccaggactgaggggacagtcatgagggggagatgacacagtttaggacaggcttccctttaaggtatttaactttatagaaaatggaaagccttccccaagcgttctcttattttggggaaaaaaaatgaatgtgcaattcaactgtaccccagaacagtccatcatgaacttggacctttgtcactcacctgtcaaccccatctaacaccacccccaaaaggagtagaacaggaaaccagctcccacagagggttaaaggcacagcatcctcctgtttgtatatagcagaccattagggtatttttatttctcttctctccatgttgcacaataccacatcaaaaatacatttgcagcaaagcttattttctgaagatagataatttggttaaatcttttccactttgatttcatctccagtttcggacgagcagcagtacaacatgcagcagcaaaagcccattttattctcatgaaaaagaatttaatgaccctctgatataaaattgatcctctgataagatggcacttgtgggttactttgacagaaatgttaaactaagtaagtctgcacatatccactgatgtatggcacctcgagttgctgctgggactgcagaggacacatcattctgcctctgcttgggaagggggagtgggtgggagcttggactgtccacactggtctagcactattgtgtcactgaattcctacagaatcttagcagtcattgtgtggcctggagctcacatgggttgggaagtttggacaactgtcttgtagaatcaaacattttatttcaggcattcccaggtggtgtttgccctggttccagtctctgatgccacagtcgcctatctcgtggacaggtggaagtaaagagttaggatcaaagctgttagtaacaaggacaatgaaacactactttatgccaattaggttagcaagaattagaaaactgaaggataccaaggactggggaacaggtggggaaactggaactgctctgaaccagtgttgagaatataaactggtcggatattttagaatattcctggcagtacttaatgaaattgtgcatgcatatatcctaaggcacataagtaagtattgtgtggtggtatgaatgctggattctcacacagtgggaaattagaagaaacctggagatgcaacaaaacagaatggataatgaaattttgtgaatgcagcaattagaaacaatgaagtgggcagatacctaacaatacgaacaattcctaaaagcagcgttagttgaaagcagaaacagaattatatctgtagcacaatgtcctttaggtaaattaaaatcatgcatataggtaacaccctgtactttacatatattttggaagacctttatcaaacatagaatagttacctgggggtaaaggaagggaaatggaagtgaggaccagagacgaagatggaaaatataaaaaaagagagttcttagatgggttatgatgtgtcataagctgagaaatatgactaactcaagtctttgcagcttatattcaatttaaaaaatagcacataacttagaacatggaataaatgccaacttaagtggtgattttgatggctacaatccaggccccctttcccaactgtcctccaaacctcctttatcctcttgaacaatcagagggggatgctgtaagatgagacttaaaagccgcaggggagtttggggggggtctctcgcattcctgaggtccctttgactataggtaataaaggttaacagaaggtggaaggctggttagagagtcaattacaaactaactgactcacaaggatgggaaaaaacccaggagatgcactacgatcttgtaaaagggagatttcctatatatatatatatgtttctcatttggggagtgcattgactttttgacttgggtataatgatcacctggagaggctgatcaaaacaggagcctgcctgaatgctttatagcctttcactccttgtagacatgaagatagctaagaaaaagtaaatggaggtcatcaaagtcatttgcacttgtaaaatgtgacccagcaactattaaacacaaaatctctgataatagccgtaaaagaaaagaagtgtcacctatcctaactgacaaaggaaaggaaggagggaggtgaaagtcagatgcagaacaccgattaacttcctcttctgagaattaaaatggtgaccacttttctccttccatctaaccaatttgaaacaaagacaaggaaggcaaagcttcctcaaatctggatcaccactcaacctttgaaaggctattccattgtcaccaattggcatatctgatcgggcaaatcaaggactgaggtttggaaacagatatagcaaaaggtgctatcaagtgaaagggctgagcaggaaggttgattaagtccaggctgagtaggaaggttggttagctagggctagtgaagcagctgcccctgaagttctgtaacaactgggtacaccatgtagtttacaagtaatcctcaaacctggtcaaaaatgttgtcattgaggcctagtggttgagtttttagaacagaaaaaagtagcaagtggagactctggaagagctcctagacacagaacatcttcttagagctttcctagtgctcaaatcttctacaaagccaaaaccgctctttagttaagcaaatttgggatgaggggaagtaacaaatagtcatattaattgcatggcagtggttgttttgtaaaaggaatagctagctggtgggtcacttcctctgctctccaaatcaattgttttgcacaatggagacacactccttgggtcaggaaactaaatgtgagtgtatctgttcccatgtgtgtaaatatacagctctcatgtgcctaatttatagcaagtcacctactactagaacatcggcccttcagttttggatcacttgaattattcaaaccaaagacgccttcaccaccaatgatcagaggaaaagtgattcagatggggtttagaactactcagagtcttccttgagtgcaagcagttccggcttgtgagaaattcagagaagtctagaaatagaaataacaaacacaaaaaagaaagcctgcatgtttattgataacaacctgataggaatgcatattccttctccaattccctttccttctgcaaagagttaaacaaaaaagtaattaaacaataatttctttgtgagtgctggacttctgaggcctgttttctctgttggaaaaaaaatagatttaagataatggccctattctcctcagaataaattaagctcagagataaagaattccattactaatgcctttcagcaaagcccaggcatcttttaaagtcaaactttaaagtataatatgccgtgatcttgttaaaatctttcctgtaatgatatttaagtgatgggcaagggtatcaatggttcaggcaaagtattgattgtatatcttcagggctgttgagctctttcagagtattctgtttgagggaatgcattgtacttatttaaagacattttcaaaacagttgcaagttaactcaagtaactgattttttgtatgtaaaactgtaggaaaaaagggaaagttggaaggggaggatagaaagataggaacctgaaggatactcaagttataaatcaatgacaaagaccaacagtaagtggatcacgaggtcaggagttcgagaccagcctgacaaacatggtgaaacttcacctctactaaaaatacaaaaattaactgtgcatggtggcgcacacctgtaaccccagctactcaggagggtgagacaggagaatcgcttgaacctgggaggcagaggttgcagtgagctgagatcgcaccattgcatttcagcctgggtaacagagcgagattccgtctcaaaaaaaaaaaaaaaaaaagactctgggatattcctataaccagcacagcacatagaacctgcttcaagttaacgattcttttaggtgcttagctctcaccattttcttttctgttgaagtattgacaaatgactcatcttcacccttgtggtaagaagtagtcccttcttccttggggagcagggggtttcttggagaggagatagttagttgctagtctggaaaatctgcagagtctcagcaaatccagctccattctctccggaagagaatgtgaagagtcagagggagcacaggaacaattcagtgagcaacgatggaggatactgtctgcagaaagcatgggtgatggcttgggactatggtggtcctgctggcaacctcttggtggtgctgaaagcacctgaaccattatcctatttaagtcacaacttggatgtctaaagccatcatatatgatgtccacatacagatgatgaccccttgaacatgggtttgcaattcccattcatctcccctacatgactgtatgtgttttaagggcagagtttgaaaatcatcccttcctcacttgataacctgaataatattcatggctctggagagcaaaatccttcaaaaactggttttcctccttgaaacaaagaaacaaccagtgagttttcctggaactaatgccatcctagagttcgcagctaaagtgacaccagttgtttgccaggtggcttcgggcacaccccaactgcagcatggaatgtctcaagggtcatagggctgggccctgcctctccactcttctcttatgcaggagaatgactaacaccccctaggtgttagttggattctgcactcggattctgcaaagactatcctggctcctgggcatcaactttcagttggaaggagctatggaggcttgttccagtggtctcatcatcctggaacatgcacagggctttggggctacttggcctgatagctcgtccaccaaaaggtgctgtcattgatgctggcaaggaaatacccactgtgggaagggctgtagatatcctacaaaagaaatccagttcctggtgaggtggcacacactttcgtgtctttgttatagaggaagaggatcccattgcttaacatttctggcttacatttattccaattctttggattgaattaatctatttgaaatatgtgcatgcacacacctatatgcacatatttatgggatatatagttgctcgtgactttaaaatgtatatttcttatgaaactaggttaaagttttatagaacagaatgtgaaagaatgctctcataagtatatccccctaatgcagtgaatttgtttaacaaacatttgtttggttcttgctatgtgtcaggcaaggcgccaatccctgtggatacagagaagtgtgcgtcaaagtccctctcctccagagtccacaatctattgaggcagatgaatgagaaaacctacaaagtatgttaggaagcagacaggatgctgggcaaacactgggacacagctcctttccaatattctggatggaaaaacctagttcttacagggctatagtcatggaagagatgcaattttgtattctgttttcctcctacttgtgttttaatcacatttccttctgaggctacatggttgcaccctcatctctcagaaagacttttctttaaataaacagagatccagatagcaaaatgctaccatccaatgtctttgcctatatttatttcattacttcatctgaataatactttttttaaaaaaaaggaagcccagcgtcctatgaccttgtgaaagaagcaaaaaatagcatcatttactcagcagcatattgtacctttgcctattgttttcttacttgtctaattatttaaaaaagaatagctgtggtaaagcactctctcaggcacaaatatgcttctgatttaagaaattattatagaaaaatgctggaagccttgtagtcatctttgctatatttagagggaaaataacgtccctctgcaattaccatttggtatgaagtttaggcactcacatttttcttttcttttttttttaaactaattttttcctctttttctctgggttaacaatgcagggatcatagttgcacaattattaaaaagaggccacttaaattcaactctccatggatacagtgtctgtggcaatgtttaattagagattaaaattgaggaattgaataattgaggttgctaatgaatttgaaaactcagcaaagcaaggagagctgagcgtttttccgacttagcttttctttctctaacccttttctcatttcctactattatcacatttctggccttgactgctgagtttattactacccataaccctggcctaagtggaaacaaaaaagctgtagcctctttgctgagctcctggagacatttggtctattggatttatgacatgttcagaagcttgcagttgcaggaggctgacaatgatgaaaatgagatatgttgggccaccaacgctttctgtaatcaccttaataggtcaacataacaatggatgttgctggtggaaaaaataagaagacggtcctaaatcaaaggcaatttaatatattagaagttctattgctaccccctctagggagactggattatttgggtaccttgcttggtaggcttgcattagcttcaggtgcccaacaatgaaagtaatcccttggttcaccctggaacagaaccagttctttacaaggtgaccctataatagctatccccttggtagatagcacatctcaactctggcctggaggtaattctcaagcagggatttctgcactgggaggaggccagattacaagaccctgaaggtcctttccaactctaaattgctatgattttatgaagatggcatagaaaaaactgcctcactctaagagaaccataccctttgaagcctctttttaacacacaggtaaagttttcaggactatttttatcatttggacaccgaacttcagatgagatattccaagtttcatttagcacaacatatagatggtttaaatctacattcaaggtaaatgtctgtattttatggcccgaagcccccaaactcatgattatttgctattttgccattgctagttaaattgggtcttgatgtttactgcatctctgactgcaataagactgatcactagtggggatagtgcaactgataaaaggaacctgctccaaagcaatgttaacatagcagatatttggtcagaaaatcttttatgaattagaagtcattcctaataacatttccttaaaacttcttagccacacttcttagctcagctgctgatggcttcctactaatgactttaaatacatgtttttgacatcaggaaaagaaataatctgtcttacaaggctgttcttacttataccaagaacaatctgtctcctgctacagtttagcacagctatagcttgggggtagggggtcaaaggaggaagtatgcataatgtacatatttaatcttgtctcgtctatttttatcctatgttcactcaatatttgtagcattctctttgcgtctgtaagcatcaatgctattcctcagagacattaagatcccagagaagagaaactgtaaaaatgttctttgatggtatctaggacaactccaagtatagctaagtatataataaataactgactatccatgatggggatgatgatgatgatgatgatgatgatacagaaatagtgtgtaaaaaaattcatcttcagatgggtatttgtggcaatgcttcagaggggagagacatttcaagagactgggtcattccctggtttggcaaaaagggcgacatgatggttggtgtctatgaagacagctgtgtgtcatcaacagaaggttctcataccacacagctcagcttgcagaggaggaacggggcttgattccatggcttccctacttgaaggcagggcttggcttacttccaataagtcaccttccatggcaaggggagggtgggtgatattttttagtgaaggagatgcttccggggggagctgcaagctgaggggctgcaccaggaatacaggattcctgggagttgatgggaaacttctaaccttcaactgccttcttttctcatttacacaacgctatcctggggtaaagagccctaaataattgcaatgcatcaacttggcagagggctacacattaggtaggtccttccataatgtctttctcattaagagtctaagcccataaggcaatttgtggcatttactgttcatcgctcaggggtcagagggtggggagagggatctttcattttgggccttatcgaacctgtcccgcttgtgacccacaagagcattgcaagcctcatcctgcacagtggcttggtgtgtgattcggtgtgctaaatggcatgtctccattctccaatctgtctggccatgaacccttaacagaacaccagagacctatgtgagatggaattgttgtgtaccgccacagcctgacaacacagagccctatctgccgctgccagttcgggcggatgcctaacgagcacactggggagagcctccagtggggacatgactccccaaagcacttcaggggttcctttgtccgcacccagccatgcaaaattcctggtgcagcacagctaagtgaggatgcacggaggagatgaaacaggctgacaggcagagccattctgtttggggtttgtctacaaaattgtcagttcaggtctccaggtcaaaaatcattttatctgctgaagcagatgctttgtagaacaaaatgccaggccgacttcaaggccgggaggtgtgcagagccccaggctccaatcacactgcagcaggagcacactccagcccatcctgcccctctctgaattccctcactcagagataggctctcttttctctctgtacactccagctccctggaagactttctgacagctccctttctgcgggctgactgctcaagaagcaagatgttcaaagacatggctcccagtctcggaaatccaaacctcacgccttgtgtgactgatgagccacttttcgttgtttgctttcttaaaaataagcattaaaaggtagggaggtattgggagaactggaatgatcagtcttatcaaaagagggaaactgaggcttaaggaacggaagtattagcagcaaggttactcccaaagagacatgttacagcccctaccagatggcaagaaccttgaaccttatttgattgctgcctctgcccagtaactttaatctccctccagcagagaagtggatagggacccccctgccatgaaaaacagcgttgttttttgtttttgtttttgcttcagatctcctttcctttcactgttttttttagcatgtatgggaacattatattcaccaaaaatcaggactagcattaaacccagaagatgtgaactgcacgcattataaggcaaattagatcctgaaagtctgcactgcactcggatccccagcacctcctctgtagcccacagtgcaaggctgcctgtggcttcttcctgggacgtctgctctgcctcctgaaaggatggctttgcctttctgaggtccatgaagggaagtcagagtggcttggctgagccctacattttctttttctgtgtaattccatttgataaagaaaaagcatttagaaaggttcattgtttagatattgaaagacaggagggaagcagacctaggaaggaatccttagtttccttttgttgtacaaggacactgctctcatgcatgtcaacccattcctcatggggcccaccacaccataaatgaatcaggcaataaaggatcccagtggtaccattgtcagaatatctaaattttgaattaaagacttggttaagatatgaaactacctaccttccatttggaaatgtcccttgaactctttccctagacccccactgattggataaggtgagtgaacccgagctccaggtgcctcccaagtccactgtgaagatgccctgaacacgatgtggaacctaggcgagggaggggtctgcattttatcagatcatgatctgtgtcaaatatagttatgagtattttcatcaaagaatatcatagtttccccagcactttgtgaaggctgcgatagagaggaaattgaaaggcagggtcatttccaatggcacacaacacagtgacctcagacaacacagtgagctataagaaaaagatggcttgcagacgccaggccaggcaaagagactttttgctggagggacaggttgagaagcataagagaacttcggcaaccacattctttttaaagtattggagctcttctaccatttgctcaaaaagcgttctgagtaccaactatggcaaggtttggagctaaagtctagagctataaagatcaatgcatcttttcccctagtctaatgggatagacaggccttgaggacaggaaatgagactgaagtgacgagatggacacgaagtcagcaggatcgggcccctgctgccctgcaacctcatctcctcccattctcccctctggctcattttgccccaaccacactgaacttttgagttcccccatcaagtccaggccctttcctcctgagggtcttggcatctgctcaccctctgcctggaatgctcttcccctgggatctgcgtggcttgctcctcactttcttcagatctttactcatacatcaccttttcaacaaaggctttcttgaccacctgtgatgtcacaccgccacccaaaagacaccccccaaattcttccctgctttcttttcctccatagcccttatcagtacctaacatataaatctgttatgtatgttgtttatgatcctgccccctcccgtcagaatgcaagtcctatgaaggcaaatatctgttttgtttactgccgtattttcagtgcctaggcacataatagacccttgataaatatttattaaataaataaatctaggtggatattccaatcggttgctttgacattcatggatgccaagactaagagatttttatgatcattttgtccagccaagactaagagatctttatgatcatttcgtccaaccaaagcaaggactccgaagcaggactgcttgtgttcaaaactggcctccatctctgaccagctgtgtgactttgggcaagtcactttaacctctctgtgctctggttttctcatatgcaatgtggggacaataatagtgacttcttcacagggttgttgtaaaggttaattgtaattattatataaaatacctagaacagggcagggcatagggtaaacgttctagaaacactggctattactattggtattatcaagaaaactgaaagtcacaaaaggtaagtgatttgctcaaaatcacaaattcattcatttaacaagtattaaagggcttcccatacaccagaaactggggattccacagtagattaaatataatagtttctgcttttatggggcctatagtctaggtaggaagataaatgtcgaacaaagactcaggcaaatatatgcagtcatccctcgttattcaaggaggattggttcctggatcctcttgggtatcacaatctgcggacgctcgagtctctgatataaagtagtgtagtatttgcatataacctaagcacatacactttaaatatctaattacttataatacataataaaaatatatgctatgtaaacagttacttaaatttgttatattatttaaagttgttatgttaaatttgtgttattttttattgttgatttgtatttttcaaatattgtctattcacttggttgaatcatctctgaaggtgcagaacccaggcgacacagggggccaactgtaattgcaatctgaatgaccaccatgaagacataggtcaccatgaacatgaagtgtgggagacctaatttctcttctcaggcagggaaggaatggggtcggagagggaggagttcatgggaggtgtggcactaaaacccaggctccggcctgggactctttacattataagtgtgtggccctgggatcaactgtggacttcttcactagcctgagagttcctcaaggcaagagagcaaggacgcattgcactcatccttgcatatctgtagctccacctcaggcacggtgcccagctcccagcatacccacagagtgagagccatgcctattccttcagcacgtgctaagcgccgactctcagggcatggctctgaggatgagagagtgctctgagttgagatacaccgcccacaatacaccccgtgggtaattaacaaccgagaaagggctctgctgaatggagtcgcaacagcacctgtctctggtgtcctccaccctttcagcaggccaggagtctcttgggaagcctaccaaagaagggagaaatgtcctttgctctccataaccctaggggaggcaggatcttgacctcagagatgaccttttgccatcattgtctcagctttcatgaaaacagttgtgcatgaggctgaagcaccgccattataaaaaacttggttaaaatatggattaatccctgggagggtgttatgcaagattcagatatatggtctgtgatatggatatgatatttttttattgcaataataagtttctcaactcctaatggaccctgtattaactgaagatgacagggagcgagggatggaaagcgggcaatttgttaaggttgcagagcagcagttccagggttgtaaaagataaaacatttcagagtcattaaaatcagcctaaattgtctatctgaactcaaagcaacaaacccaacttggccctgagtccatcaccagctatttttttctttacagtgttttgattctcttggactatacacacagctcaatcttctactcccagaaggtccagggctttgaaaagactaatctcaggacttcctggaggaggtggactttgagtgctcaagcagtggaagggaggcagcctttgatggatacacatacctttataaaaaggctttcagatgcaggaagaggcagccaaggtacagtgggctggctggagagaagggatcactgggggtggtcttaaggcctttttggggttggggcctagtgggtagaaaagatcttgaagcttctgattaggactttgtagttgtctgtatgagccaagaggagcataacaaggatttgaggacaaaggtcagactcatgagttagtgggtatttccagtgaagaggctggctactatttgctaagagcttactaaggtccaggctccgtgttgagggattttcataaactaactcactaaattcttacaagaatcccacgaggtaaataatagtgtatacgcatcatatggatgaggaaatcgggcaagtttctccacccctttaggactccacatcacataaccaataaggcagctggactagggttcaaaccccaacaaactaacctacatgaatgtgttagctggaagatgtccctctttattctgatataatgcagtaaactcccatgtgtcaggctccattcacctgctaggggaaacatctctgatggcagggactgccaggtatccttgctctcagatgatgtcagcagcaggaaggcccagcagtgatgctggactagacccctgggcttagcagtgagcaagactgaaagacagatgttctcattgccgggggaaggaaaggtgggctttataacaccctctgcacctgccctgggccacagggactctttctgcattttatcctctgtggaggagaaagtcaccatgaacagaaagggttggcacagaagagagcaggagggaagcaagaagcagccccaaggttcaagggatgacacagagagaaagagagggtggtgctggtgatgacaatgatgactgcatatttctagacatggcccctccaagtaggagacatgggcagaaaggagaccagcaaataaaaagcagccaccatgctgagactcttctttgaaaatggcattgttgtcaaacttagaaaacagtttcccaccctgaataaaacactgacatttgtctaattaaaaaaacctaatggagattctgcagacagagggaagccgccagtgcatctgctggtgaagtctccatatggcccaatccaatgtgtactctgctgcagagacagagcaggactctagaatcgaagctgcccagccattaaatcaccttcacggcctcactggccacggaccaacagggcaggaaagctcagcccagatttctgctgtgcccctcctctctccccgcagcagtaatgatctgacctgtggaccacccctcaggaagtgttagtggcaggaggtgataaggaagagaaggacagtcaggaaggactttcctcttctgggccccagcagatggtgggatgtgtccataagaacggcatccgggcacggtggctcacgcctgtaatcccagcactttgggaggctgaggtgggcggatgacgaggtcaggagatcgagaccatcctggctaacacggtgaaaccctgtctctactaaaaatccaaaaaattagccgggcgcggtggcgggtgcctgtagtcccagctactcgggaggctgaggcaggagaatggggtgaacccgggaggcagagcttgcagtgagccgagatggcaccactgcactccagcctgggcgacagagcgagactctgtctcaaaaaaaaaaaaaaaaaaaaagaacggcaactgggatgactcagtagagactgggaaggaagccctgcagagaagctgccagcccacatactcatggagagccccaaatcgtccttcagacccctggcagtctggaagcctagatgtcgtgaatcaagcctctggcaaggacagcgcagtgaccaaccctcttttcagaaggacaaagtggaatgaaagcacaagccatcaatagcatggtcatctccctggagatgtgcagatacccttcaccttcaagcaggctaaaccggccgagagtggctctgaggacctgcaggtgctgcccacatgtgccctgggctggtcctccctcagctccctctcctgtcttcacctccctgggccatgtctctcaccttttgtggtaattcttcacttctctccacactaattacccctttccatctcacattcctccagctggttcagcacttccgatggctccagtcctaagcacccctcacagtaggcatcaaccaagaacatatcacactcacctacaaaacaagcaacccaccatgagctgtgagatggaaataactcatcttatctattcatctggaatacgatcctgatgaacaggagaagggagaagaacttcaccttccttcaagaggccatgctgggtagcaatggggctcctgcccctgctgttcatcatgtttctggggtctttgtttcaaatgtgaggcacaacagagcatcctgctgtatcagcctaattaccagcctctccttccattcctgctggcatggcaggtgaagtatagcgaagaggaacttggcgtgataatggaacctagtgatgaaatttcttggccactactggccattcatgatcataattaccaatgacgctttatcgtgatgacagaggagggcatgcagagtggtgacacctggggtgcacccatcagtctaagtagtcaagagaggaaatgccttaaggaaccacgagatcccttgaagagactcagctgagcacacgtagttaccagaagtggctgttaggcaagtgaaatgtagaatgttcctctgaccttaactacccaaagattagaacgctgctgttctgtaacacctggagctgaggctggacagttgagcacacatcatccatctttcagtgtcctttctccatgagatagttagggtcaatagtgattgcaggtgacacaaggttttccaaatatggttggggaaggcagtcactcctcaaaatccatttcatttctcttccatagtggcagtattatttagggaaatgagcagctcactggatgagtccattgttctcagggctatttaacctcctcatcactattcagttcagaatggggctagtgaccttttttagactaatgaaatgcaagggaggattgctgaagggtgtctgaccaattatctcactcttaagagagaggatggaaagccacacagtttctccgactgactgtaaacgcagagtgtcttgcccagcttgcagctggcagctatctgatggccatgaaggaggctggcctgggaaaaacgcagtccatgaagaggaaggagctaagacaaagacagaaaaagagacccattgccttcatcaagcggtacctaactctgaccttctggttatgctagtcaacaaaattgcttattgctttagtcaattggagtcagtttctcttatcagaagcccaaagaatgccttccataagaaaaagtgcctcctctcaagtctgcttggaaagagactaccatataagagctgagtgaagaagctttgaagaggcctggcagagtagagtgcaggtggagtctggggaccgcatagcagaggaggggtctgtgtggctgacacctcatcagtgtgcttcagaggaagctcattgctaggcagcacatctgtccatactcatgaacaataggtcaccctttccacctcaaggacaacaagtcagcagcattacggtagactatattttgtttccaactatttgcaggtcagcatcgactcttgcttggctttgtgactttctttggccaatggaatatgagtgaatgtgatgccacatgtgagcaggtgtttgaatgcaagcgtctgatttggcttggccaattcctgccctctgtcatgaggaaggaatgtctcggataggtgctatgcctgtggccagggccctaaaaggaaagggcacgtggagtagggccacagctgacccacagcccacttgtgacatgaaagagggagaaacaaacatttcctgggctaggttactgggattctaacatagaagtatatacaaagcaatactctattcccaggactctatgaagtgatttggaagataaagaatgatgagacatggtttccattctcagagaatttataaacacagcaagcaccagaaagaattacagagagtgcagaatcctggaataccttgcccatacagattgtgaggacactagagttcagaggaaaggaatatactggctgggatggcctacaagaatgggagaatgggtgagtgacagatgacattggatagagttaacagcagacaggtgtcacagcctgagctgaagatttgcagctcaccttgtcagctgatctcatgaaaggagggacattgagaatgcctgggtagcatacgccactttttcttctgtctgccggaggcaaagatgctgagactttcactttcatgtttgaatgaaaatatcttagtgtacaaattatcactttacaattaattatgcagagcaagtaacacacatgagacctcaatattatgacagcttggaaatttactgttttcgaacttaacatgcaacaagtcttgccaaatgtacgttgaaaagtagcacaagattagacaattaacattttaatgttgtatattcacagcacatctgtgggtcagtgtaaacaccacaaacaacttggcagatgatgtcaagtggacacccccctaagactctgaccttaaaaaccaacgctctttaattaggcctttccttccccttctggctttgggagaagagactgttatgaaaaaagacatgattacaccatattggagttcaccaggcatctcaaatactttgggtttgataaaaaacagcagatttcattgctggaatcttcccttcagaatctgtaagcaccatgtggatatcaaggggaatttcatcagtatgtttctgattcctttacacttacatcattaaaagatttttgagggtttttgaagtccaataactctcctgagccattcttcccccactcccagcatatttttcatttcttttcattaaaattaggaaattgaatttcagctctgtattttttttttaaagctcgctgcttgtaaataatggtggctaaggattaaatccccaattctaaacattcgtcctgagatccatcaagctgatgaagatttgtgtatcctcatcgggcccagatctcagacaggagagacgtggtcaactgtgatttgagagatgaattcaggcatcataggcttcctttgcctctctgtagaatccagttttgtccaagcgagacagtatcattgactcacatgaagagtggaactgtagtgttggaagctgaatgagcactaaagtaccactcatctaactctcctgccctcatcaggccaaggctcagctttgtattttcaaaatctctttgtaagttctctcctggtagctgataactgttttagtcacattgtagtcaacccattctttgttatttctgacataaagtgatcttacctttaggtaagagcatttcacattctcttattctcttaacagatctgaacctagtcttgaaatgggtcacataaccatttgcaaatgtaaaaaaaattcttcacaaaggttccagtctgtatataggcttcatgacagcagggcctcatctgctctcttcgtgcaacctcccccagccacagaacagtctccagcacatagtagatgatgcataatatttgttgaatgaaggagtgaataaaattctaatcatatgtaaaacatatacagcctttcacagtgcttccacacctagtgattaatagcgttctaatgataccctgaatgagtagcaaaggtagggtgatccttagattatttataaagcagatgagcccagatatggaataacttaagatcttatggctggtcagtggtaaaactggagtaggtttcagatcacctgagtctcagaatgtgctgttttcatatagaccagtgcttctgaaggttgagttaggcatatatcagagtcacccaaaggatttattaaaacacaaattgctgagccccatcctcaaagtgtcacttctgtaggccaagggtgggccgccagaatctgcatttttaacacgtacccaggtgatgtcagtactgccggccctgggaccacactgtgaggacaactcagaaaggccatagtttacgaactgcaaaatgaaggaatatgagggagagagaaagacacttcttaacatcctccgagactatgtttagggtatcaaactcaactgatcggtacagaaagccaggctgtgtgatttaactgcagaagtctttgctatcccttaaaaagcaaacaaacaaaaaacctgctaatgtagatcacgggacaggaagttccaacctggggatattctaacttagaatgaaggttagctggagtctttctaagtatgaatttaggtttcgaaaagagattttggagctggataaagcattagttacatggtccaaacttctcacatatgcacctgcagaaagaaaggggttagaagggtgatgtgcctagtccagtgtcccagactctcttcatgcctgattcttcagctgtaaggcataatcaaaaggggacaggatgtcccccagcttggttctcctacgactgtttctgcggggacagttggtcaccctatacatgtaaattcttttaacttgtacaccaatgttcattgcagcagtattcataataaccaaaaagtagaagtcacccacgtgtctaacagatgaatgcaaacacaaaatatgatatagtcacacaatggaatatcattcagccataaaaaggaataacattctgatacacagtatgttaaagattcaccttgaaaatattatgctaaatcaaatgaaccagacacagaaggatatatattgtacgattccacttatatgaagtattcagaataggcaaattcataaaaataaaaaatagattaaaggttatcaggactgagacggaaggaagtgggagttattgcttaatgggtacagaatttctgtttacagtgatgaaaaagttctggaaataaatagtggtgatggttgcacaacattgtcaatatagttaatgccactaaaccgtatacttaaaagtggttaaaatgtcaaatttcatgttgtatatattttaccacaataaaaaaattaaaaaaaaacaaggaaaaacctgcaaacaacaaaaatctttccaaaccacgtagcacctccacacctatcctgcctctcttagagcactgctcagttgtaggctgtgtggggagtgagtaatgatcacctggtgcaatctggtttctagtatgagttgcttccactcatactagaaaccatatatgtataccacatactagaaaccatatactagaaaccactcacactagaaaccaatagtgaggtggttgccactatttccattggcaaccaatacttttctgccactccactcattgtctaaccttaggcatggactttagaattgaggtggcgtttctgaagaacgagatggtaaaaacagtggcatttctgttccctcctccaccccagttgcacgctttggtaattgttgaactcgatttcacttggtgtgtgatgacacatcttacagtgatggagcagaatttagatgctgtgactcatctctccaagctgggtttccataagactccacactgatctctggcatgtttactgctgcctgggaaactggttttgtgcattctcagaaatacgagattggcccataatgatatgcatgcctctcagagggaagacagagactcacggtatggcagttgaaggacacacgacttgagggagatggatgttactgaggcaaaagaaatgttcattgcctactcgctcatcatggtgcttccctcccatgtgtgtgtccatttgggcctcagcaacatccccagatgctgggcagatccagtgaattgcaagtaagcaaataaacatgatttaatagtagatgagaagactttgccacaccatggtacctccccctgcatttattttggcaatttggtgccgaatatttacgacagtgctttagaccatccaggtagttttagcgtaaggagtgaagtctttgtaaactaagctgcttgttcctctgacagggtgataagcaagcttgtggtggagggcagttaccggattttaattaactagctgaattattacgtttttgcataaacattcttcaccatcatccactcatgacataggttaggtacatttacacagagaactaaaatgatacattctctgcctcctaggagtttataatctaagaaagggattgcaaatacatagaaaggctattccattcttcatctctgtgacatggcagacattactaatcaaggatagttccccttttcaaaatcttttcctgcattggatgccaggcagccattgtaatcaattgcagggtgtgcaaggccttcctgatgtctgcatgttataaagaatggggagctagctgccaagacattcctatgacaccagatggggaatgtattgttacatgtattttaacaatgtaacaatattgcatagacccaaggaaatatgattttataacgtcatatgttataacatcatatgttataagatatgtattgttacatcatattatattattatttgtattatatatatgtatatatgtattattatgtgtattaatactatattatatataatatgatgtattgctacagacccaaggagatatgattttttaacatcaacttaggttttcatacctttcaagtgataaatacatgcataatttgtagaattaaggcatagtgcttttgtgggtttcgataagcctgacttctcagtgtggatgctcccatgttgtggatgagattgagcgctgtggtaggtgcagccatcactaatgtctttgcccctaagacaggagcaagctgggccccttggttaaacactgattacagccacatactctcctcacttcctcctttctgtagttccagttgagtaattaaaatcacttctgttaaagtagcatggttggctcaacaagccaagggcaagtttacggatctggaggatggaaactactttaaaccttggtagttctggctgcagtgaggaataacaattagaataattgataaccaggtccttgatgtccagtcaccacccaaggcctgcaacacatcagagacaagcctgattctctggctggagtagataacagagctggggttgggctattctggttgcttaagctgcagtggccaaggacatgcttcactttggtgacaccagttgtgcagaagctcttgaactcacacagttgaggtctttgtggtctgggagagaaaccctttccctgatatgtgcacagtaagcatggggctaaataggtgtgcatgactttcagattacatgcaaagaagttttagaggttaagagttccaaagaggacagacaggatttgctggagcaggcctggggtaatacagaatattccagtaacaatagtgtaactgcactactacagtattaagagtaacaatattgttactaaacaataggaggatactactaagcagtaacaatgctactgctaattgtgtgccatttattgaacaatgactacatacctgatatgatgctaaatgtgtttataatgatagcatttaattttatcatttaactatatcatgtaatcttcatatcaaccccatgacgtacttgtcacttgtcattcttcttattgtacagatgaaagttttcaaagatgaagtaattttcccaaagtcaaacagacagggagtggcttggttaagaatctgcccccaaaactcatgctgctcacttccatatattattgctcttgcacaatctgatatgctctcccatggctgactccataaatgcctcttttgtctatatcaccataagatgcatctttagatcccaagaaatctatcgattagacaaagataaatgctcagcaccataatcatgctatcaaatcattgaaccgatgaacgaaaggtggagttaaatctccctcaatgtgaagatccccactgcactgtggaatttagtccatttgatctggatttgggattccagttaaagaaatcttcatgtgaagagatactactgctgctcactgtttcttgccaggtggtgtcagtgctctgtttgcctaaaggataaattcagacatttgattttctgcccatagcatcctatttttcctgatcttacttggctattcctcaggatatgttttaagacagatatgttctttgatctcattttaaacttcctctttggtctctctactttctccctgtcttacagacccctgggcaatcacttttttccccaaccagctcagactccatggtccatcacttcaaccttgtagttacatcctcgtcctaacatcgtaccttcctagaaaaccccgcgcctaggtcactttacaattggccttctctgcctgattccaggatgctgagagctgctagacaaaattacctcaacactcagattggcccccgtgatggttaatgttaggtgtcaacttgactgaattatgcgatacccagatagctggtagagcattatttctgggtgtgtctgtgtgagtgtttcaggaagagactggcacttgcatctctctcgccccctgtgggcacagaccatcaaatcagctaaaggcctggatagaaccacaaggcaggggaagggcacattctctctccctctcccctggaggtggggcacccttcttctcctgcccttggatgtcagcactctaggttctccaacctatagactctgggactcgcaccaggggctcccccagatctcaggccttcagagagttacaccattggcttccctggttctgatgaccttgggcatggactgagccacattgccggctatcctgggtctccaccttgcagaaggtttatcatgggacttctcagcctccataattgtgtgagccaattcacctgataaattccctcatcctgtcttgtatctatctatctatctatctatctatctatctatctatctatctatctatctatcttcctatctatctacctatctgtccatccatcttcctgtgttcctatctattatctatctgtaatctatctatctgtctgtctgtctttctttttctttctatctatatctatcaatctatctatatctgtcttctatctatctatctatctatctatctatctatctatctatcttcctatctatccatccatcttcctgtgttcctatctatctattatctatctgtaatctatctatctgtctgtctttctttctttttctttctatctatatctatcaatctatctatatctgtcttctatctatctatctatctatctatctatctatctatctatctatcttcctatctatccatccacctatcttcctgccttcctatctattatctatctatcatctatctttctgtcatcctatctatctatctatcatctatctccctatctatctatctatcttcctatctatctatccatccgccttcctgtcttcctatcatctgtatatctatatctatctatctatctatctatctatctatctatctatctatcatctatcttcctatctatcttcctatctatctatcttcctatctatctatccatccatcttcctgtcttcctatcatctatctatatctatctatcgatctatctatctgtctgtctatctatctatctatctatctatctatctatctatctatctatctatctatctctatcatcttttggttctgttcctccagtgagccctggctaaccctaacctgcttgtcatgtatgatctccctcctcaactggcccctccatgctgcctccagtccctgtgtgcctctgtggtcagatcatccattctccatgaaggctgaatcaaaccttctccactttataaactttactactgcatctcctcacccctactctcagtagaaggcctcttcctgcttcttaaacgaaacagaagccgacagataagtatttcctccatgtccatctccaaactcatcatcgtgtgcctgatctgtgcccacccttccactttccctgcccttacatgagaagcatgtaacgttccctcccatacaaggtgaatccctccatcctccactggctctgcagacccctttccctcccacttctagggaccttgttctgtcaagtttaccatctccccttcttctcagtagggaaagtctctaaattatgtgcaagtctctcccaccctaaaaacaaataaaaagcagcaggagcagcagcaacaacaacaacaacaacaacaacaacaacctcccttcactccactttcctctgcagcaactgccctattttctcttattcaataccaagccccttgaaagagttccttgcatttcccggactcatttcttacccactcttcccacaatccgcagtgttctggcacccatgtctaccctcttcccagatggttcttgccgaggttgcgaagggcctcatgactctgagtccctgtgaccaccaggcagtctttgcatccctcgagtcggtgcccttgcaccaagcattcgtgccctggctcccatggcagcatgccctcctggttttcctcctccttctctggatgtttctgctcagcttgccttgtggatcttcttcttcttcttctccttctccttctccttctccttcttctcttcttcttcttcttcttcttcttcttcttcttcttcttcttcttctcttcttcttctcttcttcttcttcttcttcttcttcttcttcttcttcttcttcttcttcttcttcttcttcttcttcttcttcttcttctccttctccttctccttctccttctccttcttccttctccttctccttcttccttcttcttcttccttctccttctccttcttccttctccttctccttctccttcttccttcttcttcttcctcttctttcttcttcttcttccttcttcttcttcctcttcctcttcttctccttcttttttttttttttttgagacagagtctcgcactatcgcccaggctggagtgcagtggtatgatctcagctcactgcaatctccacctccagggttcaagtgattctcctgcctcagcctccctagcagctgggattacaggcacctgccaccacgctcagctaattttttgtattttagtagagatggggtttcaccatgttgcccaggctggcctcgaactcttgagctcaggcaatccacccacctcggcctcccaaagtgctaggattacaggcatgagccaccgcacctggcctgcctacttcttacgtgatggtctatcttgagagttctgcccagatcctttttataaccatagaacaggtttctctactgagctccagccctatgtacccgaatatttactggacatctctacttagaggcttcataagtaattccagctcaaatgtgtccaaagtgaaattcattggctttccccccaaaccttcttttcttcacatgatcctgatgtggctcacccgcttgtttaagccagaggctagagcatcatccaaggcttccccatttcccttagcccctatgaccagtcactaacttttaaaaatcttacttctaaatattgttcatctctctattcccagtactcgtcatagcgccttgtagacacttgataagcagtggtcttatggctggtagcccaggcagctcttgatcctgtcccctgggttccttccccctttccctggctcaggccaccatcacctttgacctgaatgcatccacgcaactggttttcccaccttcagttttcccttctagctcgctcactctccacaccacagagagtaatctttcaaagcacaaatgaggtctgtctcattctcttgcttacacccttcagaaagctgtctcccagcacctagcataacaccaggtccttataagtactcaaaaaatatgtgttcaatgaaaaaataattgggatctaaaataaagaggatttccaggcacacgggaagtctaacacccattaatcctgtgccattattgtacttgcccgtttgcaacaaggaacatctttggcttcacacacccgacccacagactgcgcttcagctgctgctgactccctcccagaaggccccagagtagtcttgatttaaaggcagggctgttgggggatttggaagaagtgttaaagaaaaaggagcagctttgctctattaaaacccctgcctttccaagcaaatatggctgctcctgagctcaccctggcttctgccattgcttggccaaggtgattaactggatgcctgctgtgtgctcatccctgccccatcaacaccctcacctcaaccctcctggttagcctctctgatgttgagaatgaaagttgttattagcatgattcactctccaacagcatgaatattcggtgtgactgtggctctgtgtatgtgtgtgtgtgtacatgcttatgtgtgtgtgtgtgtgttgcagtggaggaggttgggataaaattgaaaaaaaaaaaaaacagtcctaggagttatgcccttagggcaaagggaaaaggggtgctcacacacttgtcctagagagagatgtacacttttgcacagcttcctcctcaccataaaaaggtcgggggggggggggggctgttggtcacaggattgtgcaaagccctgcaagggtttggctggtgcacctgctctgctatgtctccacctgccacacaccattgcaaccccctggtaacagaaaggttcccttcccttccccaggctgttggtgccgtgggatctaacatgcatgtgtcctgacaggatgagagagcaggcacacgcatgaggcagcctggtggcagaaggccctgctcttttccaggatgcctgtggtggcggggggagcatggcaatgaagaagggatgggacagtgatcaggaaagcttcatggctgtcctatgatgacataggcctggagacacagaggctgcctgaggccagcttgggggatttacgaactaaatggaagaggctgtcaggttcgagctgagctcagtatgagggctgagcaggagagcagatgtcagggactgggagtttggccagccctgccctctcctccttggcagtatgtcttcctgttgtcaatggccaccagccgtccagcttcattctccactgggtctatgactgccagcatcccggagccacttccagggactgggttaaggtgagaacgttgtggtcacctctgctgcctactcccaccctccctgctcctgcacttctctctggccacaggtgccaggcagcatggctgcactgcaacagcctccctaccagcccaggtaccggccttctccatcctctcctgccaccgcatgtccccaggcactccttcctcctctatctgtgacagtcagagaacagggctttctgccaggttgacatcaacagcaaacagacacccccggatctgagacatctgtgtcctatccagaaacatacctcatcctatgtactgcagtgactcagtcatgggcagagacacctggctgtcttcccatgatgttcttatatgactctaaccaccacgcccctctgcctcgaaccccttacccacacaatcactttgggcctcagcccatcgctccaggagtggaggagatgattggtaagaagaacgctggaggtgcacactgcctggcaacaaaggacaggtgggtggcagacgaaaacttggggcctggcacacctgggtttgaactctggatagaccatctacttgatgtgtgacctctgtgcagcgattcagttccttcttctgtaagatgggaaaagaggatctagccagtgggttgtgagaacgaaagttaacattaagcattcctaacacagtaccccacattgccactgactgtagttatgctcatttgaatatttccctgtcatatggtaatgagcagctctctttggagccacgcaccttcctccctgggctctgccaaggtaggtcacggctctgagagactgcaggaaggcttctcagaggagctggtactatgaggggtgactcggctgggcttctgtctctacacacgtcccttgcctttgcagaagcctctcaccagcacccttcctgccccggtgacttgctgccagagctctgcctggaagtgtgatggaagccacctggcatgagcttgaaaggaactgcaaatctcctatgagcatttcccccctgctctgtggttgggatgcagtgcacggccaagcagcatggaaacctctgacgttgggtggcttctgaatactaaagagggcgcggaaaaaatgaaagcaaaggagaaagatgtcttggtcagaagtttttctaatcgctatggatttttcccccattttagtggatttgagagagggtataggaaaaggaagagaaaaaaatcaaaagcagattattaccccgagctgctcttcctttttatcctgagccatgacagcagctctctgcctgccctgtctgcatgctaacagctaaggcatgatgcaggcaaaatattggcaatcgagctgagattataggttacttggatattgaaaggcagaatcaattaaaataaagctttccagtcactggccaaattagcctctggaatcaaagcctttcttttcattgtccagaaggttctaaggacagctgagatggggttacccaaatgactgaaatgaaaagctcccaactgcagcacacgacacctggggagtaagcacacacacacacacgcacgcacgcacatgcatacatgcacacacatacatgcacacaacacactatgcacttgatacacagtggttactcaatgaatatttgttgagtttatgattttgtgtgtgtacacactcatacttatgtgtcttacccagttatatatacaccattctataattatttcaactttgcaatgctaggagttaactctgccaggcttctgtgagtttgtactaggcttacatttttctttctctctttattataacaagaatacattattttaataaatacaaaaaggaaaggtctcctttgaccactctgcctttggtctacttttacagaaaatgcggacattatggaaaactttatagaaatgtggctttttactaagccatctaacaatagaatagaaaagcaacgaagatttccagtgcttcttccctcctccctctgtcttccacctcctgaatcttcagcagcatgcacagaaaaaccaagcataggaatgtgctttgatatccacccggggctttcccacattctcaaaatctcaagagtagctcttcttagaaggtgtggccttggaatgtggagaggcagcaccatccagacaaggctgtccaggcaggaggtcctgcacatccaccttgcaattcacttaggctttgccactttggggatctacagttttaaatagcttatgatgaaagctcataactttttcatttataagtggagaatttcaatgaggaaacaaataaaaaaaccaatatttgttgagtgctcctgtgcttctccaggctggatgaaggctccaagatggcgtctcacaaggagttcagaatctaatgtgctcaaatcacacaagtcattgccataagtgctaccgtcaatgtatttttaaaaagagcccagaaaagagagattcactctgcataggagcttcactggccttgaggatgtgcaggagtttgctaggtagagaagagatgggatagatcccaccagtgggaagatcaggaacaaagctcagatatctggatgtgcacccagtgtttagggaatggtggatgtggggctagagcagaggtggggaagaaatgaggtggaaaagttgactggggccagatgtccttgggccttgaaatccttcctacttcatcctttaggcaatgggcagcgattcccggacataggtccagaggctgggattgccctgatcagggctggttttggaaagacagctctgaaattagtgtagggaatgaacttgagaaaagaggccctgcaggcggacactgtcatgagctggaggctgaagcctgggaccccgacgtggtggcgaaaatcagggaaaaggcaggactggggctatttcagaagtgttagccatgcttgggggagagcaaggtctcagttaatgcaaaagaccctcaccagcatgactgggtggaaaaggatgttttaatggacataaggaacacagcagatgtagagttttattttttttctttttaaagttggtttgttttgttgattggtttggaggcagaagaggtcacgaaggagagggaagaattaagttaagtttgtggcgcttatgagctatgtggatggtggtatctagtttatttctctgagcttaggtaaaaggttaaggccaaactatgggcttgggagccatgagcaaacccatgattggtcaaactatgagaatgaatggatgaaataaatcaacatggacagaaagagagagtaaaagaaaagagagagaaaaatcagagatagaaagacagaggtcaagttcagatgtacataccccttaggagcttttcaaggacgtcggcagggagctgggtttacagagtggagaggacacatctgccaactgtgactgagcgtggtcagagggaggagaaaaggcacaagagagcaaaacatcttgcaagctaatggagaatagaattttaaggaggacagagaggtcaaagtccccaggaagtcaagtgacaagatgtggtcatagtgtagggatgagtcccagagcctcctcccaggtccaaaatgtagctaatgatccgaatgaaatccagacagggagtcaagacagggaaggtacaggcttgtgggtgctgagggtgtggacaggaagagaggcaggagactcagagtgaaggggagaggccttttgtgtacagaaagaaggaggtcagttccacaaatgctgccgtctggaatgcagaattttctgacttgcctaaaaagatcgaaacaaaacctaagaagcagaaaacaaataaaaataagacaccaaataccaaaagccaaataagaccacgtaaaagcaaacagagcctcctcaagccagagaggcccctgacccagttttgcagcagcaagacccagagttccatccaggaagcaggctgcggcagtgagtcgcccaggcctagaaaccaaaaatccagcctgcctggagtcctcttgggtatgaaagttcctggagaatctattcatggcttccaatttccattcatcaggctgcacatttgcctaagagcgattccacgctaaacataactcagcccagaaaaatgctcctctgcgctctctttccactgctgaatttcagcttggcttaagtaacaccatgtgacataacacaaagaggtgaaatgagagctcataattgcatcagagggctgtgggggagccacccccccccccccacctcaccgattcccaagtacacttgagggaggaggaaggaggggtgtgtaatttgttcatttcttatattttatggaacacttcactttgctttcagcataattatttgttgtacattttgctgattcccatttgtgtgcttaaaaaaaaaaaactcttcactcccccctgcacacttttcttaatgcattaaaattaataactcgtaacagtgacctaatttgctttgagtactgtaactcagggttgttgtatgcgtgtgtattttttttctttccagatctgctaaacccttgacatgttactgtggtaacaggagcaacttgggaagttcatgaatgaacctcattgtgttctcccaagaaagccctctctcccaccattctttgcgatgtttggagctcacccttgcctgttgtgcctatattcaaagcattggaattgggctgctccaggctgtctccaaatccatgctcaatccccatcatctcactgccctactgcggaggtagctgccagtctgcccttaactttcctaaatgctccagggctctgcatcaggagggttctccttctctaagaaaatatactttcttggtttaaatcttctgcccttccctgccatgtctgtctgggccctcagctaaggaagcctgctgaagataggaagtaggtcactggattgcttcatcccctgactaccacctcaatccaagccaccagcttcttccctaattgtctcactgcattctatctgctcccccaaccccctccatatccagtgcagttagaggggtcttactaaatcaggtatctggttgtgttactgtcctgctcagtgatcccaggattgtgtccctacccctgcacacagctgaccaggctcttcagagtctgcagacatagagctgtacttgccccaaggtccattgcctcctctgtacatgttcctcctagctatcctgaacgacctggatttgccaggctatggcacagtcatttttctgcatgctttcacattcggttccctctgccagaattcccctatccatctcccactctcacacaggacgagtgtagacagcaccttctctcagaaagctttgggcagttggataccctacctgtgagttcccacaggcctctatgctcatctcagcatggaacttatgtgcactacctgtgtttgtctgctggtcttgctggcttccccagtaagctctttgagggaaagtcctgtttcttggacactgttgtttcttggacactgttgttatctccagaacctatcgcagtgtctggcacataggatgtactgaaatcaagattgaatgaatgaatgaatggatagactggaatctattacctgcctttcctccctccctccatacattccttctttccttccttcctccctaccccaccctactttcctgtcaatcactccacaagcattcactgctggttatgtgaaagggaaggaggatataaagacggattttattgtcttccaggaacccatagcattgtggcatccagactttgagacaatcttaaatacgttcttctgaaggctcccttaagtaagccctcttggctagtcattctagagaatgaagctgttttatgtccaaatctactttctagtagcaagtataagaatgaggattccaagtcctagttgtctaaataatttaaatatggaatagtggcagatacccatattcattcttccttacagcattctggggaagattatcaccagtttacagacagtagcaatgaggccagaaaggtggactcaatccccttatggcaaagagaaaagatggtgacaaatgatgctagtaactgagggctgccagcacccagggagccccaggacacgtgttgccttctcaccccaataggagtagatggacgaggcatactcgtaccaaggagggcataaggattttatttccacagctacctggagaagaaaattcatcatcaccctcagcagacagcaagaaaagaagagaaagaataagaatgtatcaaggaggcttggtattgattttgaaatcctggctgacaagacaatgatttgagtccatttccattttgtggctgaagcctggtgcattctttgcctctgcctgacctcccagagcagagttcatcaagaatcccctctgctgacactcctatcctgattctcaaacagcctctcgcctgtttgtctccgacaagaaaggacatgcacgtgaaaggagcagtgtggcttcctgtgtctcctctggaagaggagggccctatttcaaggctgatttcaaatagtacattttaaaagtctgcttagcctcacacacatatgagcatcaacattagtgtctttacggaggttttcggcccgcacagaaagggcaaagctcaatgcattcaacccaacaagcagcaggttcccgtcttggacaccgaaagtggggggtcctatttcaagactgatttcaaatagcacattttgaaattctgcttaacctcacacagatatgaccatcaacattagtatcgttatgaaggttttcggcccatacagaaagggcaagtctcaatgcattgaacccaataagcagcaggtccctgtcttggacggtccctgctacagccacccccagcaggctcttcaggccaggaaatgtgcttctgctgtgagtcccagctcttcgcatggccagaatcctaagtaagggcaaaaggcctatgtatttaatttacttgtaagtgaacagcttctatgtgttagaaaaaaataaactcaacctacaaaattgtaattgcttgagatttcacctcctggccacgtttctcttcctatggagttattaaaacccacacaatatgatctaataatttattaataatcaacataaatagataacagctcacatagccataatagccaatgcatgttaaataatgagggattatttaaaagacacttcgctggagagaaggagacatggtagttagaatctgcaattactgctgcagttgcagataagcatgtacacaaggccttcttggctgttcaactggctaccttgtgcccctgttactccatctgcatttggaaggggtggggtatcagccagtccctgcttaacagaaaaagacgtccaaattaattggaagggaacaaaccatttcttcacaggacaaaggaaaaatgctgtgcaattcaatttctctgaaaggagctcaacaatactccatctcctgtcccactatcaaagtccctatcatcaaacctgggcatgtctttctcatggcagtttctttatccttactccttgaaaaataagtgagtgagcctaagttcattgcagcctaatgagggactccctggtcccttctgtcattctagtccctatttgtaagcccttcctccttcaagtcatcacgttatctgccttaggggaacctcctttatactctttgcatgttttaaagaatttcaaattcaatatcagatgcttggcaactagattggaaggaaagcagaaggaaaactgtctttatttgtagattatttcatatgtaaaaaaatcccaaagaatctacaaaaaaatcactagaactaataaatgaagtcagcaagttcacaagatcaatacacaaaattaatttggtttctacacacaagaaatcatccaaaaatggaattaagatatcaattccatttacaatagcataaatagcattaaaataatcaaattctagaaaggagtttaacaaaagaagtgaaatacttgtacaattcccaccaaaaaggaaaaaaaaaaaccaaaaacatggagagaaattaaagaagttctaaataaatggagagacattccattttaatggttaaaaaatgttaagatgacaattcttcccaaatcatctttaggttaaacacaatttctattaaaatctcaacaggcttttttctcccctaaaattgacaatcaagttctaagatttacatggaaatgcaaaggatctggaaaagacaaaaaaaaaaaaaaatgcaaaagaacaaagttggagcatttaaatttcctggttttaaaacatactacaaagttacagtaatccacacagtgtggtgctgacaaaactatagacatatggacatatagatcaatgaagcagaattgagagcccagaattaagctcttatatttagggatttttttaaagaaggtatcaagataattcaatggaagaatagtcttttcaacaaatggttctgaaacaactagacattcacaggcaaaaatatgaacttagaccctggcctcataccacaagcacaaattaaccccaaattgatattgacataaatgtagaagctaaaactacaaaaattttaaaagaaaatatagtagaaaaccactgtgactttgggtttttctatacacaccaaaagcacaatccatagaataacatgaagaatgtgaacttcatcaaaattaaaaatttctgcatttgaaaagacaatattaggaaaatgaaaagaggagccacacactgagagaaaattccatgaatcatatacttgataaataacttgctgtagaacgtataggaaactcttaaaatataataataagtaagtaatgccattaaaaatggatgaaattcaagagtattaacagacagttcataatggaagaaaacatttgcaaaagtcatatctgacaaaggaatgatatccaaaatatacaaagaactcttaaaactcagcaataagaaaatggcaacttgattttaaaaatgagcaaaagacggccaggcgcggagactcatgcctgtaatcccagcactttgggaagccgaggcggacagatcacgaggtcaggacatcgaggctatcctggctaacgcggtgaaaccctgtgtctactaaaaatacaaaaaatagctgggcatggtggcgggtgcctgtagtcccagctactctggaggaatggcatgaacaccggagtcggagcttgcagtgagccggggtgacaccactgcactccagcttccagcttgggccatagagcaagactccgtcttaaaaaaaaaaaaaaaagagcaaaagacaccaccaaagatatacaagcatgtcaaatatgcatatgaaaaaatgcttgtcatgagagaatttcaaattaaaacaacaataagataccactacatacttattataatgaccaaaatccagaacacaggacaagagcaaatgctggcaaggatgtggagcaacaggccctctcattcactgctgctgggaaggcaaaatggcacagccacttggaagacagtgtggcagttaaaaaaaaaaaaaaaagaaaagaaacatactctcactatatgttccagcagttattctccttggtatttatccaaatgagttaaaaatgtaggtccacacaaaaacctgcacacagatgtttatagtattttcattcacggttgccaacacttggaagcaaccaagatgaccttcagcaggtgaatggaaaaataacctgtggtacatccagacaactggaatattatttggtgttaaaaagaactgagctattaagccataaaaggcatagaggaaactgaaatgcttattaccaagtgaaagaagccaatctgaaaaggctacacatactatatgattccaactagatgatattctggaaaagacaacattatagaaataatacaaagattagtggttgccagggtttgtggggaggaagagatgaaaagtagggcacagaggatttttagggcagtgaatctatcctctttgatactacgtggtagatgcaagtcattatacatgtgttcaaacccataacatgtactgcactaagagtgaatcttagtgttaattataaacttcgggtggtaatgatgtgtcaatggaggtccatcagttgtaacaaatgggccactctggctggtgtgagatatcaatactgggggaggctgtgcctttgtcaggagcagggtcatatatgggacctctgtactttctgttcaatctcttgtgagcctaaagctgctctaaaaattaaatctacattttcaaaaatgggcaaaaaatcttcaaaagacatttcaccaaagaagatatacaaatagctaataagcacataaaaaactgcttaacatcattaatcactggggaaatacaaattaaaaccacaatgagataccacttcatacccactagaatggctataataaaaaagacagaaataacagatgttggtaaggatgtaaataaactggaaccctcaatacattgctggtagaaatgttaaatgttacagccactttggaaaatagttcagtagtttcttaaaaacataaatttaccatatgatccagcaattccactcctagatgtctgcccaagagaaatgaaaacatatgtccacacaaagacatgtacacaagtgttcacggcagcattattcataacagcaacaaagtggaaaaaaatctaaatgtccatcgactggtaaaagaatatacaaaatgtggtctatccgtacaataaaatgctattcagcaaaaaaaaaaaaaaaagcaaatgcatattgaatgcatattgatgcatgctactacacggatgcacctcaaaaccatactaagtgaaagcaaccagatacaaaagaccacaaattgtaaaattccattgatacgaaatgtccagaaaagacaaatctctagcaatagagtatagaattgtagttgcccacagcagtgggtgggaatgcagatgatctgcaaatgggcatgagggatcacttgggagagatggaattgttctaaaactagattgtagtgatgtccgaacaactgtgtaaatttactaaaattcattcaattgcaaagttaaaacagtaaatgtgatggtatgtaaattatacctcaataaagctgttaaggaatagcagatgcttattaaggatgtcaggagggtacacgaatgcagagggcacacactaagaacactacctatgattaatttaacataaccccattactggtgaatgtgtctttcaggaatacctcctgctgttgttgtatttatctaggacatagcctcacacttacatcaagcagagacaattgaagccaccaagttcaatccaagcatcatctcactggcagaatgaaacaggataacctccagcttagccagaaagaggatatgacccgtcaactagtactgaaacaaccactgccttccaaatgcctcccatttatctcagtgtgggttaaaaggcctaagcaatatagttatcacttgccagttgactggcctctcctttgtacaagggcttggatagggataataacttacttttgtaaagcacttacaaagtgccttaacatacactagctcatctattcccatagcagctctatcagcagatgtggcaggcgctcttggttgacaggccccgtcattatcgcagctccagtcaaggacacgtgagcatacatttcctggaggagctttggagaaagcttttgccttactgatacaataagacagatactcggtctcttcctcttttccctcctctgtgcctgaaacaaggatgatgccataaaaaaacagcagttggccgggcgtggtggctcatgcctgtaatcccagcactttggaggccaaggcgggtggatcacgaggtcaggagatcaagaccatcctggctaacacagtgaaaccccatctctactaaaaatacaaaaaatcagccgggcgtggtggcaggtgcctgtagtcccagctgctcgggaggctgaggcaggagaatggtgtgaaccaaggaggcggagcttgcagtgagcaggaattgcaccactgcactccagcctgggcgacagagcgagactccgtcccacaaaacaaaaaaccaaaaaaaacccacagcagtcatgttggtactgccaggggagcagtgggtagaaagggccaagagaaccccaaagagtcacagagatgctgcttctgacatgggtaaactgctggaccaactctggcagcatctccctagaagccatgttaagagaaacaaatgaatccctacttgtttataccattgtggttgggttttctgtttgttgttgccaaacctatacctacctggcaaagtaggaattattagtcacacttcacagatgcaaaaagttgtaagtctttgaaaaactctgcaacccatcaaaccaacatcaaaatgccagcaacttgcactcagtttcctgaatttaataacagagttaataacagccacaaccacaaaagccacctattgggttccaagtggtgtcaaggctctaatgacactgggcacttgactggcatattttctctaattcttacaactctgcaggctgagtgttactatctctattttatggatgagcacagtaaggctaagaaaggtcaagtaaattgctcaagatcacataggtagtaagtggtagggccaccattctaaactggcatgtgtcttgcctgctatgaagaaagcttaaaggaataaaacatacttcctaggattaggcaaccagctactctaggtctccactgattaaaaacattatgtataggaaattagcagggatgattgctcgtgggagtcaggttagctagccaaactcataatatttgcttgtgtgttccaactgtcatactctaaactgtaacataaagaaagtttctagacacaattttcttttcactgtttacaaccacttttgtatcttatagaaataaaatagaaaaaacacacactgattacaagatgcacagtacctacgaaaatctctacaggatatgtgagatcagctttcttccagagagtgggtaacaattaaaacaccagtttttgtcagcaccaggcctaaggacagcagcctggaacccagaacaagtaggatgagacaggagtctctaggtagagggtaaagatcagcctaggtacctgccagggaaaaagcttcagtgtgagaaggaagctcctagctgagccccgccctgccaggcacacatagtacggacccgcagtgatgcctgttgttatcaatgtatggatagtattggtagtttctagtagacttgagctgctgtgggggtctgtgcatgttggattggacttagaggagggtggtaaaaaccagttcagagaaatttgtagatgttaattgcaaactgctttctcttcaccagaagcaatctctcccttctgagatgggcaacatcatctatctccatcaggcccaatgggctgctccaccttcgagcgcttaattagtttgtctttctggatgctctgtcctcccccatcaaagacaagtaattggttctcttaaacatggggcatccagaactgatggagaagtcttttcaagggatcatggaactctgtgctagggagaagacaggcctcagattctgtcaggtagggttctagatggtgctgctgagaggctaccttattttcacaagttccaatgctagcagggactctcctggccaccttaagtggcgtttccaggagaaaggctgctcctctggtaggctgcaagcatcacttcgatttgtgaggtaagacaaaaaggacaggtgaactaggaggatcacaccggtacctttgtgaggagcaagcatctccccttccttcagactgggttgtttagacccaaacttgcccttggtcctcccaaatgctgctatttccctctatatgattgagtcagcatttctactttatatgaaactgatattatagcaaatcttatcaccatgaatgtaatgaatcttcctgccaagttatcatcttgtgtctctcagaggtgtgtcttctttcccaaggtcactctgggcaacttgagtgagccacaggttcatacaggggccttgggacaatcattaggagaaacccagtacaaataaaaatctgattagactttacctcctctgacttttcaccacctcctctatcctactctaccaaccttcagactcttctagctacaggctttcccagagcccatctctggggataaaatggactcatttagctcattgaacagatcatcaaatgcccactcccccaagaaaagaagcagtttggaccacaggcaggtcagaatgccctagcacttccacaaacagcctgctctcaaaggattgtcaaacgtgcaacaaatcagtgttctctcatcaaaagcatcataactcatttaacattgagcctatatctttttaaatatatcctttttttctagattggaaaaacaatagttgtttcttttttcttttatttcagcagggttccagataataaaaagatttataattacgccagtagatttacttttgctatgccgccctagattatgaaaaagtataattatatgcaattaaaaaatgaacagtatttcttacccgagtgaagctttaaaagtcattatgaatccattagctcagcagaccttacaaacggccttcactactctggactgcatttaaatttacaacagagagaagtaacttttcctcatttccacggtgtgtgtgtgtgtctgtgggtgcatgcattttcacccttctcagccatacctggaagtggccattcatttttacattctaaggccatgttcttagtattgaacttgaccacacagctcataatgctttagaagcctccagctagaacactgaggaatgacctcagaattcttctacttagccttgtccctacctctttactcctctgtaggcagtaattcttttttcttttctttcttttttttttcttttggtgtaacagtatcgcatgagccaagactgtcatgaaactatttggatactgtactctggttccttcatctcctccatctgcatcagcctaaattgtcctagtgagttcacttatgtctgggttactgtagatttgggttttgctattactagttgtctcacttatccagataattacctagcttgattgaagcttagtctgttgactaccagaaaacaacacatacgggagaattgatctagataattcagacaccattcatgatgttatttcaattgagcattcttgtgtgacaagaactggtaattattgaaaatttcatctgcataaaaatactagatcttacccacaagtccatttcctcttgtctctcagtgttagactcaccctcagcatcatttttggcagtggcccagcagttatagtaaaaacaaacaaacaaaaaaccctccattgtcttttatttaactggccaaaattgccacctgatctctccagtctcactgtatttgtctgatgctgttagagccttctctgtagtggctgcaagtctgctaataatcagaatcacttgggaagcaattagaagtatacagagatgagtcctaacccagactcatgatcagaaattccagaagtggagctcaggaatctgcattttaaaatcactcaccaggtgattctcaggcagccagcctcgcatggtgcataaactgacgttgacattccggcagcctagacaatgggtatactcaggtgaataagagggatggtctcttctctggtcatttttctactcttacctcttcatcctttcttagtcttctgattcaagcctggatgaataaggattcctggaatagtacaaaatacttgcaactctcgcagtcttcccagagtgggctggatgaagggtgctatccccaaatcaggggccgtgccctgggaaggatggtaggcctccagggatctatctcagtgtaactaactcctcagtgggctcaaaactttccctcttgctttctagtttttaggttttctagttctgttgtgccctttattcaatgcaagccatcaacaagttccttaaacataaaactctgtgacactctaaactgcaagacaatgtgacaatgagtatgccagtctgaaaagaacaaaggagcagggttcagaagaactggcctttaccagctctgtcattttccagtggtgtggccttgcagaggtcacttcagttttccaggctttggccaaagaaaggtgggggcaggtggtaccttcccagctcaagtcttctggaatagagcgtacgcccatgaagccctgcacctgttggagcttcatagctgtaatcaaggtattaatctctctgagccttagtttactcattaataaaattggaataatagtattctcaaccatatagttgagtaagaattaagtgcctctaaaacccctagcatcacgcctggcacacggtaaacactgagtatctttaacatgatgtcatcatcatcatcatcatcatgaaaaacatactttctcatgttctaaagggcccaattcatactgcccactgtatcactctgacaaggtaacaaagtgacctcagaaacctggctaacaagagatcaaggcataaccctagccatggattcagggaacagaagctggcccttctgtggaagtcccggctgcccaggtccatgtcgtccctggctcttccagctggagggggtcactcaagcactgtggagtgacagccagacaggaaagcaactgcatttgtcctaggagtcatgtggcatgtgctggatggcgttttgaataacattttaatgaaccaagtccttcagtgtaatgcaacctcagaggtctgaacatgctggccttctcccctgcactctttgtgtggccactccaagagtagatgcgctcccttgaggcgctcccttgagccctggagcttgccgggggcagccaccccttccaggatttctgctttccatgcaatctcccttttccttctctctctgagaacctcaaaaccaagttgtttgtaaactcctctacagccccaaatggctctgttgcaaggctcggctcgttaacatgcaggcagtaaagtatgtcaggagctctgatttgtcatattaaggaggctatatgactgtggagaggaacattaaaagattttattctaagatattccctccaatccccacccactgcagacaaagtctcttgggacaagcctctgcttcagtgctcttgattgcacagatttctgataaatgttttcatcagtgccataggcctgggtgctgctcctgctccactggggccttctctttggggtctcaggattggcttttgaggtgtttctgggccttaagcagctcccatggtaaaacattcaccgtcattctttctctcttctcactcactcaattacagttaaagccctgttccagggaggagtggagggagactccatctccaccacggaacgccttactcctggaactaatcacagcatttctctaccctcctcggaacaatctgataccattatcactgacatcatcaaaagaagttccctttatagattgcattgtacaaatagaattgcctagatgtgatggctttgcccattaggagtgtacaagcatatttacacaacgccatggagcatgggtgaaggatgagcccaggacaagattaaatcagcagactgaacgataaatgaacagtaatgcattcatatcgaatacatctcagagcataagtgccatccggggtagaaggcagggaaagggcatgactgcagggtcaccagggccagaatgactgatgtgaggggtcaagggcaggctttgcctccagggaggcattaaagggccacctcctatagtgaaaggaaggctgccacatttccctatgccccctgagttttagagataccctatttgaatgagagaaaacaaagtgaggaaacggctaatctcaaggtttaggaggtgagggggacatagtatcattcggtttggtctaggtggagacttcttaatttagatattgatgcagttcgggacataccaaaatatgtcaccttggcatttgacaaaacagcagaggcaggaagtttgctctcaccttcccctcgcctttctcccctgaagcaggtggtaagattctcattccaggtgccctccctacccggaagaaaggaagatccttatctctgaagataccaggacacagagaggaatctgaataaatgggccttgctaggttccccagcttaccatcatcagattacaccctttggtcctcctattatatctctccaccactgtccattcctcatcaagtctaagcatagaaatgcacaggtttccctgtatctttgggtcttcattcccttaagaaggctcttgtgtcatgtaagacttatattccatacgtgtgtgtttttctctggttagtctgtcttttgttacaggagcctctgccatgaacccggggataagtgaggaaagaaatttttcctccttcacagtatcaagtgccaggccagggcactttgtccaggcctcactgtgaagaaagagtaatgttcaaggatggcagcaggaaggtgagaggatgaaaccaaatgctcttggagggcatcgggcttggttgccactgagaacttccagaagaggcacagctcaacgcggggtgccagtaaccgtcatgccttcctgtcccagtgggctgacttgagacaaagcacagctgtggtccacgccttgagacttccactgggcaaggaagcccaagtgaggctccccgcacctctgccaccttcccctacacccacacctgcaaacctggggagagtgacaccagccttccccagctcctctctcagtctaggctggagctgactcggagagaattgaattcccttctccattgctcctggggccgctaattcatagctgcattagctttcatttgggtaacagcatgggggattgtcagatattggctctgaccagatttaatctacaggctgtgttctgccctctttccacttgcctttcattcaggaccctaatgaagaggtttatctgattggtttactggagtcctatgtgggatgaatagcttcagcctttgcgcttgcacctctttgctgtccactccaatcaagaacgggggccctcgcaactctctcagttctgaaacaaattaaatctcagtgacagactctatctgcctcgagttctccattatgcttcgctttaggtttgctttggcaatgacaaaactgctttgacatatttgcggattctcaggcccgtgttctcagctcccccacctccacctttctgctgtccaatgtgatttttgtaatggcaaaaccattgcgatccttctcaggcatcccagtgtctatagcttttcagctacatatcagcaacattcagccacaagtgtggctctgacaggctgtggggggcagaggtgggagaatgccagagactggggagtggtttcctaagcctccttcctcaccctccttccagcagttcactcctttaaagagaaatcattctctcccgtgtctccgcaggtcactggaagaatgtggcctggggcccttcagtaccatttaaatctatgcttgcaatttagcaaatctttagatctgttcccccaggctgtggggaaacagatctcaggtttcccctgatgccttcaggggaagctgcaaaactaccttcaccctaatcacctgcctcattagactcacaacagacagatgttccctcctccttgagggcttctaacttaagcctttctcacctaagtttccttataatggcgggaaaagagaggaacagaatcccaggtaggccatcaatcatcctaacgttgacaacaataagcatgttgacggttataaagtctgcgttttccaagcttctgttagtatgctaagagttgccctgttggaattaataattgcaatgatattggtgttgtagtcatcacttgaggcctattaaggtcccttttagttctaaaatactgttcattcattgcctcattcatgcattcaccaaacactgagcatccaccatatatcagagcctttggtcagagttccctggatggaagtcctgtggtgactgctgctccatctgagccccttaaaatctcagagactgagctgggtgttttagaaattcaggtagtcacaaatcctgaccagaatggctgagatttctgagctggaacccagcaccctagaactaaggctcaagccccttgtgagaacaagaaccctaagcttagatgccagaattcaagtttcagtttttccccttaaaatgaccctaaatcccttaaaactgcaaaatgagtggtcatgccccagactgcggcctccagactctgctactagccagccactcttgtcatctggaagggaagatttggttgctacaacatgccaccatactgggagttgcaagacctggtttggtcctcatgcattggatcaccttactcaaaccaccttggcctcagcttcttcattaataaaatgctattagactttatttacacacagttgaaaaaggactaatacaaatgcccataaaatctacagactagactagatgttaagtaaggtgactttccactctaaaactctatacattatttgattcatttatttaacatatcttgagaacatgttttatgtcagttactatgataagagctcataaaatatgtcccaatatccataacaggaaggacattacttcataataagattaaatggctgcaaaaaattcaatgcttggatatcctaataacaggtgtaataataatcactactcttattaattttgtacttatcatatgtcaggcaacagagtgaatgttctacacaggttttgttgcaatttatcttcacgaaacaaccatataagtagatatcattgtacattgttcaaccactatttattgtgtaactagggtgtggtgggccttgaactaggcatttggtatcaccatacagagattgaatgtgcaggcattgagtggttaaataacttcctaggcacactgcttgcaaatggcagaaagaaccagaaatcttatccgctaggctctagaacccaagttcctaactgctaactttcatgcctacatcagcttggttttcatgatcctcaaaatgtcagtcaaagccagtgttttctgaatcaataactccctccctcacagtgtccttttccaacttagctcctctcgtttatgagccaaccatctccatggcagtccccttcactatgaaatagtcgtttgtattctccaggcttcactagttctcattttcaattgccacctgaacactgctactgctattttcttcttgtcttccactctttgctctctccttcacctctcctataactctgcaaaagatctgtgaattggctaagctgaaggactctaccataacctgattccagagaagcaaactgtgaacccttttgaaaacatttgctgcactactcagagcagacgtagtgaccaggaattcaagaccaactttcaatgaagctggaagtgtgcctgtcttggcggatttagaaactggacagccccttcctatcttgaaaccacatttgatttgacagcgtagctaaaaggaaaaggacgaatagtaactgagttgagttttatgtgcacacggaacatataaacacagcttcaagataaagaactttgagtcagattttcacatgtcatgtgtgagaccatgcagcaaacaatagagagatgggatgggatagctgttgcagactgagatgggattaaaaagggatcccatggcttttcacttagctaaaacaatctggaaatgttaacgtcataatgcacagcatcaccttagggagttctccaaaacaatggctggctgttcagactaatcagacattggtataatctttgacctcagtctaaataggtagctctcagaatctgtgtggctgttcatgctgtcaggggccatgatgctggaatgggaggtgaactggaactgtgaagctacttgataaaacatggtgttgggctccttaggcgttaactcagatatcccaattgctgcttggctaccccaaaactccaacgcacctcattatttcataagagatgttaaatacaaattgttcattaaaatacatattattggatgttaaactaccgtgtaattgattttctatccattgcctagtggttaaccctcaataaatgctttttgtaatcaacttaaagtataatacctaccacgcttgatgtctttctcctttgatttaataagaaaccaattctatattattgaaattgtacttgataatgaaaaagttggtcaaatttcaagaatagcataaaaaaaaaacctctttggcctgaacctgtccaactttatagagggatctcagtacaacggagaactcaggggaacctaggtcctgttccaaccatggggtattagctaaggtccaagagagtcaagtgctatgctcagagctaagagaacagcggggtagactagaaatactatgcagggactcttgttcatagtgcaatgcccaaagaactagcatagttcttccccagggttatgagatcaagaaaactatgagggattttaggcttcccaaaaagcataaaaagcagttaagcatttaaaagatctatgggactcagtttccttattcagagcttgaccagtgctcttttttgctttcttcaaaatctggctaggatttccacctcctcagggagtctgccttgactggatggaaatacaaggtgactgacgccatccatagggtaaacaaagtggtacaatggttagttcaactccagcaaggcagacagctggatatggggaggagttcagaagccagggaaagagatgtgagctcaccctcaaagcttctgaagtgtccacataatccccaaccctacagcctccaaaacataatcccatatacatataccatataacatgctgggctaggagaagaatgcctgaaagaaaacatgcactgctccaggaaaagcaccaggcacagagcaagtgtttaaaatgttagccattcttggctttttatattaatgtttattattctacaacatgatttttaatttgcttaaataatctcctgactaatggacattgagaggaatattatacagttatttattcattcatatattgcctcagctttctaaatatgaatttgctgggtctacaggtatgatttctggtgagcttttaagacatggaactcacactcttactagaagtgctgtacagaagcagcgcatgagatcattgtggttgggtgatctcaccatgtggttaccatggcctaggaatctttgtgaggtggtgggtcttctgtcagggggaggtagaaagaagcagcagaatgactctttatcagaactgctctaaagggactttatgtgattagtaggctttggaccctcgcatcctttccagttctgaaatgttctgattcataggcttctggaacacagagatgctcatgcacatgcccctccccatggagggacacaaagatgcatttccgcctggaagcacgacaggctgctaagctttttgcctggatgctctcacccttggagatcagaagctgagcatctctccattcagccatcaacaaaagggagagattgcctgagcagcatgctgttgttagacaaatcggaatcctcttctagaaaggcattctcttctgcatagtgagtgggaagcctgctgtatctaggacacgttcccaaaataaaattcagtggtcaccaactgactcagtgtaggagacttcattctccaagagagaagggctgctaagaatggcaggaaccacccacagatggtctgggtaccagttgcatcaacagatgcatacacaacacagccctttcctctaaagcatccagccaagctcacatcgagttctccactgtgtacattaaaaccaaaataaataatccaagaaaatctgcacgtctgtgtgtttagggttcaagatgaatcaggcaataggccaaaaaggaatgtaagacatttgaccactatttttttcttccttgttttttttaaatggaaacctaagcattagatcactttccacccttaaaatatgcaaggatggccaggcacagtggctcacgcctataatcccagcaatttgggaggccgaggcaggtggatcatgaagtcaggagatagagaacatcctggcccacatggtgaaactctatctctactaaaaatacaaaaatttagccaggcatggtggcgagcactcccagctactcaggaggctgaggcaggagaatcacttgaacctgggagacggagattgcagtgagcagagattgtgccactgcactccagcctggccacagagcaagactccatctgaaaacaaaaacaaaaacaaacaaacaaacaaacaaaaccaaaaaacatgcagggacacccaatgtctacaataccaaggctgacctctacgggcaggcggtaaagatctttcagaatctggccccatttacctaactcattacttatcttggaaatgttacagttcatctggtaacaatggtgtcccattgttcattcttatttttgacttcaggtccctactcatgcctagtgcattacaaaagacatttttcttctccatgtagaaagttacattctccttaatgtggatgccttcaccaactgctgctccctttcttctcccattgtacatcacacagatgaaggaggaggtggagagccacctgtctgcactcctagcctggggattctggaatgctagaacagcttcttaagagtcccatttgcatagagcaccaaagctcctcattagaaaactgatgaagaagattagactgaaaggtcctttgagggaacaaagattaatcctcccaaataaaggggagtttctaagaacaacccagttagagagattatttctgccccaagagggcaaagaacttactcagaggtaggacaaagatcaaagacatgtgttctgttaagaaaaaaaacagtttctggatgtggacagcagacagaaatgttcccaagttcttaacccaatcacatcttccaagcccctttgcaatgtatcgtcagataatcccaggctctggaggttaggatgtggatatcttttggggggccatcatctctctacctgccatgtgggataaggcacacatagtaataaggatagcttcagaaaagaggagcctgcaccttttgctttaagacaaaacagaagaaacagaaaaggcctatcaacctagagacctgagattgaaaagataggcgagtacatccgttgagatgctctgggtatttgataatggactctcatatttttacattttctctaactagaacatatgctttagaggggtagaaaccatgtcttacattttccagtttattgcctgcagcatctggctcactgaaggacacaccgtagatgctcagtaatgtctcactgatcagtgtgagaaggaggtatcaggaggagattatcgggggtatctgctgctggagatggttgtattctgcttaggaatgatacagaatagcagacaatcctgaataggaagaatttattgtgtcagggggacaccagggtataaggctgaggccccaatgagaaatgcatgcctacttcctccttctcttcatggaatgagtaattgaacttcaagtgtcaggcattaagcgaagacagctgtggcaatcattttgttaatatatgagatgctggagccaaggtaaccagaaagagaaccaagcctttgagtgacagaaacaaaggcaggagccaccagtcgctgggtccaactagtcctgcaaagaggcagatgaattggctaaatgctccctggaaaacctttccactttactgaaatctgtagtgatgaacttatttcaagaaaagaagcaattgaccaagggaaagggaaagaagaatggaaattatgctttaaaaaagatccatgatgagccagagttcaaaattacttaggagaaatagatgtgtattcatcatatagatctgtcttggaaaggacagaaaaaaagagaggagatagaggaaaaatgagggcttaagaataaatagagttttggctgggcacggtggcttacgcctctaatcccagcgctttgggaggccgaggccggtggatcacctgaggtcaggagttcgagagcagcctggcctacacagtgagaccctgtctctaccaaaaatacaaaaatcagctgggtgtggtggcacatgcctgtaatcccagctactaggaggctgaggcaggagaatctgttgaacctgggaggtggaggttgctgtgagctgagatcatgccactgcatgccagactgggcgaaagagcaagactgtcttgaaaaaaaaaaagaatattcatatccttcacacattttttgatggggttgtttttttctggtaaatttgtttaagttctttgtagattctagatattagccctttgtcagacgaatagattgcaaaaattttctcccattttttaggttgtctgttcactctgatgatggtttcttttgctatgcagaagctcttaactttaatttgtcagttttggcttttgttgccattgcttttggtgttttagtcatgaagtctttgcccatgcctatgtcctgaatggtattgcctaggttttcttctagggttttcatggtttgggtcttacatttaagtctttaatccatcttgagttaatttttgtatatggtgtaaggaagggatccaaaaccacgatgagataccatctcacgccagttagaatggtgatcatcaaaaagtcaggaaacaacagatgctggagaggatgtggagaaataggaatgcttttacactgttggtgggagtgtaaattagttcaaccattgtggaagacagtgtggcaattcctcaaggatttagaaccagaaataccatttgacccagcaatcccattactgggtatatacccaaaggattataaatcattctactatgaagacacatgcacatgtatgtttattgcagcactgttcacaataacaaagacttggaaccaatccaaatgcccatcagtgatagactgaataaagaaaatgtggcacatatacaccatggaattctatgcagccataaaaaagaatgagttcatgtcctttgcagggatatggatgaaactggaaaccatcattctcagcaaactaacacaggaacagaaaaccaaatatcacatgttctcactcataagtgggtgtcgaacaatgagaacacatggacacagggaggggacatcatacaccggggcttgttgtggggtggggggctaggggagagatagcattaggagaaatacctaacgtagatgaggagtcgatgggtgcagcaaaccatcatggcatgtgtatacctttgtaacaaactgtacattctgcacaagtatcccagaacttaaagtatatatataaaaaagaataactagagttttgttcatcttttcataataaacgtgctgatagttccaaagagaagagcctgcaaaaaagatcatggatgcaaatgtggatcaaatacacacacacacacttgggagagatagagagacagagagagagaacgaccaagtacgatgacaagataaaaaggctgattgctgacagaaaataatcaaatcgttctccaattttttgcaaaagagtaattctgacacatttaaaccacagactagcaggaaagagttttcatgatttctgcctctcagaggtctctcaaacagcttttctgatatactgtttttatataaattctgcagtgacttttccctggtgttattagttgtttgggtttttctctgcctaccacccgcttatttatgttaatctgatttagatcttttcttttcccctttctttctttgctgaggctagatttcacagggcaatctgctgagtgacacaacgacaagatgcacatctgtcagaggtgtgagcctgtgtgtgtgtgcacaggggtgtgtgtgcacatgcgtgtgcatgtgtacatgcggggtctaattctccccagggtcggtctgtgagcgcctctaataccctatgtggtttcttgagatttccaaatgagtgaggtggggggtggtattgaggtattgaggtcatcacttataggtaagtactggaggatgtagcgttagctgctgcctggactcaaggattatagaggaattctgggaagctttcatcaggcctcttaaaaaaaaaaaagccctgcctcacagttgacattttattttatagtcacgttagagttgagttcagacttattttgtgctattatagccgattgattatttatcacttcaatgaagaatttattgatttacttaatattcattgctgataacatgaaggatctgtaaattacaaatcatctgggccctcagaaatgcttaattatgccctgcctttcttgttcctcctgtctatctccctcctccccatcccctcgtcctcctctaggcctttatccaagctgggtagaacagatggcccagaaagcgcaaacccaccttgtctgtgatgaaggtgagagcatcttcccaaaccctacaagatggcttgattcacaacactatatttcaacctaggaagcacccttagaggtcatctagtagaatatcacaggcagttcattttaacagtagtcatatattgagttcctaccgtggtaggcttcatccctgtagatggcctggcttacccttgaacaactttatcagaaagttttttctcatagaaggcagaaatttatctcctggagtgttcacctatcatcatacggcaagcagcagctcttaggtaatgaaagcagaaagaagacgcacctcaaacatactgtgtgggcaacaactctgtctcttgcattccctctccttgtcacatctgaccagtggttcatacagatgtgttacacgtgccctagctcagctgaggctgagaggctggctgaagcaggaagaactgaccctctctctacactggccttgctctgatgatgtttgtgccctgaaggccacatctgcctgagggggtactgctgcaggcgtgtggcttttcactgtgggcttcctaatgcagtaggtttcaagcatgaattaggggaaggggccaacagggtaacgtggtaatgaaggagatggcaaagtgaaaagcaagttgctttaaccctgaaagaaagtatttctctagcaaacagcaatgctttgaaagcaattgacagaaagctggcttaatccttgttctggagatacttacagctgcccgtggtttttaattaatacactgggctccctaacaaaggggaggaggttggagagcattaacagatttactcacccaagccaaggaaagtgctttggaagaaatgccctggccgcccatgggccgggatcttcctagccctcccttccctgcatggcaaggcacgaaggtggtctgatgtggattccagggtgaaggtggtttgtcctccagtgtgtgttggccagggagacttccttgctgcattctatctcactccaccccaatccattctttccttccatcatttgctccctcaaccacacatatttattaagtagctactatacacagaccaggcacagtgtgtgaactgaagaactacatttataccaaaggcttgagctaggtgttttaatgggatctaaaaacgaacatgatgctcgtcctcagaaagcttagctctagtgagagagaagcattcagggctgatgttctgaatggcagtgctgggttcttactgcccgtttccattctgattgtatctgttttgattggtcagcaccactgatgccccagttcttaagtatttttaatattaccctggaaacatgaattgaattacacaacaaaatgcaaaatgttaaacgttctatgaaaaaagggacagggaacaatggggccatgttgccttcagggacccattgctgggctctcagggttgttttctgtcattgagtgacacatatgcccacctgcttgcaagtcctgcatcccattcctaccagcttcctagactctgccgcctctctacttcagtcactcatctctcttgttcattcattcattcattcgttcacttacttactcaaccaatgagcacttgctgaaggccaggcatcgagccgtgcatgggaacacgatgcttcctccccttcccaatgcctcctggacttttcctagagactccgctcagctctccttcttactccttcccatggagggatctttctcctttggttagcgaatctgatgtcagagtcattccatctgacaaagtctctcctcgtctgaaactccctgtctcctcatatcttcatcagtccatttccacatgtctagtcattttaatggcatatggttccagggggaaactccaaatgagggaaaattagcaactgtgcttactgggctaaagaaaatgactggagaggaagttttctttagaaatatccacaagaagcagcagcccaaggagacgtgactccagtaaaaatgatgatttttgttaggggtggtagtcggggtggattatcaatcgcattttctttcccctggaatgtgtcacagtcattaatttgtttaatttatttttgcctcttccctagtgaagcagcccaatccaccgtctgcctacccatcagaacaaattacactttggaaatatccgagtgcttcagttttccattaaatataataagaaaccacaatgcaccgttatggcctgctgactccttgccaaggatctacaagcactttttacaaccgctgccaggcaattctggttgtcacccttggtgacacagaggcgcgaaaacaggtccaggatcaccaggccctgttttaatttgcactcgtgtgcacgcctcttgggttgtgttcttaatctgcttcacatgcacgcgatctgattctgcagcacagttccaaagtcttcatacaggagacacatgtcctgcttctatggtgtctccccactgtgccagagccaatgactgctattgactgatgaattaacagagttcagccctgtgaggacacagctagctcgtggctcatgaaagctggccttccaacttccagcctcttctacacatcacaaggctcaaatgctcatctttcttcttcctctgactctctggctgctcccttataatcagccattgctcaggtcgtgaaaactgctcatgactgcagttcagtctgtcctaaggaacattgctaattgatgattacatttcattttcaggatgttatcttacttgggcaggttggaaattgaaatgtccaggggttacacatatggtatatatggctctttcaagtcagagattaattgttgagtattaatatttaattttttattgcaaaaggcttgtcaaaggctgccacgggaaggtgagagctcagatccatcctacctgatattcagcgtcctcaagaatagagcctctagcactgccagctctgcaatttctaagtcaaagaaggagcagtctagtgagttggactatggcagtctagtgagttcttggatgggagaagtttctaagatgaaggaggcagggttggacgtgttgtagggagtaggtgacctgttgagtcagtgctgacctctgcctggacaggagagagctctaaggtcaggtcaccttaacatctgtgtacacagacagttaggcataggcggagaaccagatgtctggtgtcaacagaactagatgtctgaagacctgggtttggtgccaactttaccattcaccaacaaatcatctcaaggaacttctgttttctcttctgtaaaatggtcagggtgccatctatctcaagggctgctgtgccattcagtcataatactgttcaattgtgtgttactttgcagttttcaaggcacaatgaaaaatggggatcctctatcatcttgaaagccttacagattctgatgaggtcaggtggatcgaaattgtagctttgttgcactataacaaagggttactaaaagagttaaaggagataatgtatgtacaacacagtgcctgacactcaacaaatgttaactgatttcttctagtagttgcagtttaaaaaataataataaaaggatgtctgggagtgtgactatgaaagaataattgtgtaattgtgaccattagttaggcacaaagacaggacattggaaacatggagatgtccccagaggagcccagatcctaagtgagttacatagaattaccctctttctgacattggccaagtgtctataagaggctcctccatttgagcccaactcccatcctctggcccaggggggccctttctcatcagccacattgtgtgatgaggtctaacagagacccacattcaagatcctgagactggccagcctgacattcagccacactcagcacttgggtcagccccatccctacctgggtgtgttcactcactctttcattctatccagggatatgcctgcctctttcactaaatttgatggtatgaagtggtcttcatttgtgaattcatctacagtgcctagtgcagtgtctttcacacatagtttttctgcttaatcatgataacctgtgcacataaaggcactcaaacactcatgcaaagcatccctagcaaagggtggttagtgtggttttggggatatttcctataaattagagcatttctcctactttttaatactttcttagtcttctttgtcccttcttcctcctctaagtgccccttgtgatggttaattttatgtgtcaactcgactgggttataaaattcccagatatttggtcacacattattctgggtgtgtctgtgaggatgtttttggattagattagcattttaattagtagactaagtgaagaagactgctttcctcaatgtggatgggccccattcaatcagttgaaggcttgaataaaaaaaagactgacttctctctctctctctctcccctgaataagagggtactcttcctatctgatagccttgagctgggacaccagtgtttccctgcctacagactctggctagaacattggctgttgtgccagcttgtggactagaacagctcttctgggtctctagctttccaactgcagatctggatatttctcagcctccatacttacacagaccaatttttaaacagtaattctctttctcatctatctgtgtatctatctatctatctagtctatctctgtattatctatctgggataaagacacacatgtgcacgtgcatgcgagtgtgcacacacacatacacacacacacaattggttctatttttttctggaaacccctgactcttatacccctaaatgttgttgttgttgttgttgttttagccagggttctgtcttagcattttcccctcactctgcatgctatacttgaataatcccactttcttcaatggctcccaagaccacacttatgttggaaaattccaaatgtttctcatcactccagatccctcctgaactccaagatacaacctcatatattcagccatcatctcggtattcctccttagatatctcaatgttctcccgaatcagcctgtccaaaggagatggcagcactctctacacaagcctgccttttcctcccctgctcctgatttcacaccttgccctacctttcactcattacccaacctgggggccacctcttctacactctctgaatcccattagtcctccaggatgtggactgtgcctccaggacccctctcacagctaaccccttcccttaacggccattagcactgctatagaccacgtgtcaccattgctcgtactcactgcacatgtttgtataagcctttctacgctggattctgtactccttctgggtaggaatcctcactgatccactgtttattgtttttttaatccctcagttctcagcaatgtacttagccaatattagatacttagcacatgactgacatctgaatgaatgattgaatgaatgaatgacttcccttggaagtccatggggtatagggaaggaggcagagcatatgataagaacttggcctgacgcaggagacaagaaacagaaatagaagtcaatttgtttgccataaataaataaaaggcaaattctccttgattaaatttgaaatgaggaaaacagaaacaagcagttatcttaagagcagggtagtttaatatcctaactacctaccatgggataggacaaactctgctatagaaggtttttgttttggggtttgtcattttcagatatccagccgaggacactgaaccaaacgtagtttttctaaagaggccctaggttatatttaaagttctcccagtgctcactccctgggatcttaagactttgatttaaaagacaagcacagagcaaaactcctgaagatcaattaatctaactcatcaagacggatctgatttgaattgcggttccaggcagcaactagtagtccagagacaagactgctgagttggctgatgggtagagagagcacagcctcaaataccctgcaaaatgccagacagaaggctgacaactaagcaaaaaattcagattttgtagatcttacttttgaagaactccacccctctcttttctttcaactatttatcaatgtatttttttttcacttacatgcacaccttgttttattgtgctttgctttattgttcttcgcagacattgcattttttacagcttgaaggtttgtggcaaccctctgtccagcaaatctattggaaccatttttccaacagcatgtgctcactttgtgtctcacattatggttattatcccaatatttcaaatactttcattattattagggctattatggtgatctgtgatcagtgatctttgatgttaatattgtaattgttttggggtgccacaaacacaccatatgagatggtgagcttaatcaatgagtgtggtgtgtgttctgactgctccctcaaccagccatttctcatctttctccctttcctcaagcctccctattccatgagacacaactatattgaaattaggccaattagcaaccccacaaaggcttctaagtgttcaagtgaaagagtcgcatgtctgtccctttaaatcaaaagctagaaatgactgagcttagtgaggaaatcttgttaaaagctgagataggcctaaagctagacctcttgtgccgaatagtcagccaagttgtgaatgcaatggaaaagctcttgaagtaaattaaaagtgctactccagtgaatacataaatgacaagaaagcaaaacagccttattgctgctatagagaaacttctggtggtctgtatagaagatgaaatcaaccacaacattcttttaagccaacacctaatacagagcaaggccctaactgtcttaaattatatgaaggctgacagagatgaggaagttgcagaagaaatgttggaagctagcacaggttggctcatgaggtttaaggaaagaaaccatctccataacataaaagtttaaggtgaagcagtaagtgctgatgtagaagctgtagcaagatatgcagaagatctagctaagatgcttgataaatgtggctacactcaacaacagactttcactgtagatgaaacaactttttattggaagaaggcaccatctaggtctctcatagctagagaatagaagtcaaggcctggcttcaaagtttcaaaggacaggctgtccctctcattatggactaacataactggtgactttaagttaaagccaatgctcatttatcattttaaaaatcctattgcctgtgcagagtagattggaacaatgaaggctgaaggacagcacatctgcttacaggttagtttactgaatattttaagcccactgttgagaactactgctcagaaaagaagattcctttcaaaatattactgctcattgacacttaacctcgtcacccaagggctgtgatggagatatgcaagattaatgttgttttcttgcctgctaacacaacacccattctgatttctatttcaaatcaaaaagtaattttggctttcaagtctcattatttaaaaatacattttgttgaggctctagctgcctcagatggtgattcctctgatggatatgggcaaagtaaattgaaaacctattggaaaggattcatcattctagatgccattaagaacatgcatgattcatgggaggaggtcaagatagcaatattaataggagtttggaagaagttgattccaatcctcacggatgactttgaggggttcaagatttcagtggaggaagtaactgcagatgtggtggaagcagcaagagaagtagaatttgaagtgaagcctgaagatatgaccgaattgctgcaatcttgtaagattttagtggatgaggagttgcttctcatggatgagcgaagaaagtggtttcttgaggtgaaatgtactctcagtgcagatgctataaacaaagttgaaacgacaacaaaagatttagaatatccaataagcttaggtgataaagcagcagcaggatttgagaggatggacctaaattttaaaagaagttctattgtgggtaaaatgctgtcaaacagcatcacatgatatagagaaatctttcatgaaaggaacattcaaattgatatggccaacttcactgtggtcttattttaagaaattgccacagccactccaactttcagcaaccaccaccctgatcagtcagcagtcgtcaacactaaggcaagaccctccaccagcaaagagattataactcgttaaaggctcagatgattgttagcactttttagcaataaagattttgtaaattaaggtccataaattgctttttagacataatactattaaacacttaatagactatggtatagtgtaaacataacttttatacgcactgggaaacaaaaaaaattgtgcgatttcctttattgcaatgctcacttccttgcagtaatctggaaccaaccttgcaatatatctgaggtattcctgtgtttggaaagatctagccaaataaaaaataaccttttatagcctaaatggctgagagcactgataaaataatggagaagacaggaacagttgtggaagagatctagccttctaacacttagtttcctgaaataaaggaagtgttagccttctcccttgccatccttcaccaaacagaacacacatacacacacacacacacacacacacagacacacacacagacacacacacagattcttgaaagtttggaagcactgatgcttgcaaataggcccattaaaagaagataaatcaactggaaatgcataaaaagtctcatttatcataagacgtgttggacagggttttgagttttacatacatttattctagaaatctgtttatctgtgcaacgtttctgaacaaaatgctttgtgacgaaccatcctctccacttgaatctatatggaaagcaattaagttcaaaccccgaagacaaaacatgataaacacagcaggcatgctattgatttggaatttcacaactgcccttcttccttttggatatcatctccttataccccaaaaggcctcctatacctcctacacttatgaaatgtgtttcttacgtcttcagccaaggcaacttccctgactactccctgaggactacaaacaatgagttacttcaacatgtctggagatgattaacctgaaagtggttaaaagtgccacccctggagtgaatgactttcctcagcccagccaggatatgactccaatgccaaaaatttgcacatgtcccatttccccacctgcacttgtccataacggaagagggatgtgtatttgagcgaggggaggtacagaaaaaattagaaagccactcaacttatccatattacactttcaaatcccttcagtgcaagggacctatctcatgaattttttcattttccatctctagcaattagtgggcaactacaaggtttgagaaagagaaaaacttcatctgtgcacagggcctggctcagtagtttcttaataaatattcaatgaacagctattgaatgactaaatctgtacatacaaagcagaggattccagcccagctgatagactattccagccatattcataatctggggtgaaagcaacacatctgttccatcatgaagagtgttattgattagcatggtcagattggtgtccactgtctgacatctgcagacacaggctgggtggcatgtgggcaacacccccttctcccccatagatagatagttttagctcttcagtgaatataattgtcagtgtgacagactctagtaggagtttgcctagtctgcactttattccatgttgggtaggtcctcctagaacccctcctccaaagaagagaaataagaatctaagatcaggaattctcttagaaacactacaataatctctcctcagcatttctgcacaaatgcccaggggtacacccagcaacctcaccccctgagggcctgccaacagcttgtgctacaaactcctgcaaataggatttattagaacagaatcaagtgacagactcagaacgaaggcagcacagatgaagaagaccctgaggttctatgcagatgttgacttttatcaaggtcaacactgagatttattgacccaagaggtaaatattgatggaggctcaggaggtcaatatttgccccaaggtgaataaatcttcccaatgaccctcaaacagaagtctgtatagagtagactcagttcgaaaatgaattagctgtgacatagattaagatactatttcattagattgtctagggcattggaaagcaatattaatactaagcacttcatgttcaaagtactttccaaacattcattaaagtgcacctccctctagcagatgcataaaagtgttgtactcccaactcaacagatgggatattagagccaagaaaaagttaagtaattttacctaggccacagaaaaagcggctcaagaacagagagataaaatggagataagtgtgagttaggagctctggggatgagcaaaggtctacagaacagtgtcttaattaacattcctggtcaaattaataagtccacttggtttgattactttcatttagttaatttatatcccattgttcacaaatctacttaggctgttcaattgtattgcttatttacagagatgcttttcggcatttacccatgataaactctacctttggacatcggtactcaactcttaagaagtgaagagtgtgttagtggtcactgggaaggaacagattggtttatccatgtatttgcataatcattatcatcacattctaattctcatacaatacctcttctcagtaacaagatgctggtactgagaaaccagtatcctggaaccctattgtgaaagactaacacgtgcgtcattgccatttgaattcacggatccagtgatccctgcttttgcattgtctcaaaactgagctttaaatattataaaattttggttctttgctgatggagaggtcagagccatggataatcgaaacctcagccaaaagaagatcaataaatattatttccttctgactttggagtgcgttattttcccgtgttttacgttggccttgttgtttttctctggagagttaacatcagaaaagagtgagtgcttccagagtgccagcgatgatagccagacaggtgacagaactcgatgtgtgtgggtatcaggtcagcagctttgaggttgtgccatgtaatccacaggtaggtacttgagtggactggcctcaacttgtagaatttagagttttcaaagttacttcaatctactttaaatctttggaaggaacaaatggggtcttgagagtgtgaccatttggttcacttgaaaaggaaacaatttgacttgaagagatgtaaatggttagctgatgccagggtctgaggaaagaatttaggaattttgaccccaagctgcttagatacctcattattttatcctgcaataggattttggaattgtagctgttacccagataagtaagtgataccaatatgatctgatactgttacaaacggtaatttgactgacaataaggtacagacaaatgaaagtgtttacagggtttaatatttaataatgtaaaaggaaaaagtcggcaaaagcaggctggagatgaaaagatctgtatcgagtcagaatttttgccgattgtcagagcagcatgcgtctcctggggacctgaataagcaagctgctgttctgcagaaattgttatcttgggcgtattgattgagtgtgcaccactcaagctgtcagtttctccctcctatccttgctttatattttacatcatggtatcctcctaaactctcacatactgcctggccttcacactttaggccgcagaaccgtggtgtactctcgaaggagacctaggtggtgtgcctgacgtgttagttctgtctgtgaggagcatctcagtgactcttctctagggcatactaatgggctcattctggaggtggctgggtgctttgagtctagagacatgccactggcccttctcttaactagcatggccaagataccaacagacttgctccgtggacagttacttaacctgtatatgcctcggttttctcatctgtaaaatgggaataatgcttaccttacagaactctcaggaagataataaacctaaaacaatcagcacactttctgacacagagctgtcctcagtaaacaagaatgactgttatttattaatgcagtccacagaaatctgtaaattaaataagaaactgtttagattgcagaagacctagccctaaacccagaatcccagaattcttgagcgagaagggcatttgagaggtgatcttatccatctacctgccttctctgtaagcccagagagctgacaatctctttactttcaaaagccattagaaatgactctgaaactttctctgacccggagctcaatgtttgtacaacctgacaatagcttgagtagctcaaacacctctgacacctggagcagagactggaaccctttgtccagctcttcctctttgtgcgtaacactgttctatttctattagcttttcttcagcaattttactttcctcggtgctccttcaccatgcccgcacatccctccaaagagcactgcaagttctaacagcccctggaaccttagagaacaggagagcaccgtgctaatgagaccaaagtcaacaggttgcttcctaccagggaataacttcccacagggaagatctgccttctggcctccaaactgcagcctttcacttcaggagctgccttgcaataataataatgatcacatctaaccttcaggtgcccttttctatatttgaaaaatctccacatctcagctgatcttcacagtaaccccgagaaatgccaccactggacttgttacatccatctcagagacaaagaagcaaccgcagagaaatggccaggatcgtgtcctcagaatgaggcaatgttcactcaagcccaagccttctgaaagtgagccctgggctctttttcttcacattacacagcaaatgaaaatggtagtggttctcaggtgggggcgattttctcccactccctccctgggtacacttggtgatgtctggagatatttttgcttgtcgcagctggggagggggcttgctacaggcacatactgggtagctaaacctcttacaatgcacaagacaacccctcacaacaaagaattaccctgcccaaaatatcaataatgccaaggttgagaaatcttgtcagatttatagtaagaggacaaacaacagaatccagccacctgactaccagccaagccctattttcctgcctatcttactaggccaacttgcttcccccaaagaaacttcatagacatttgcaaaggactttgggatactcagaaaaaagttaatagctaaatgtagagttgttggattttgtaaagctgttggtaaagttattttcattttgcttttcaaattagtttgggagttggtgttcttctttacataattacaagctgacaaacatgcttctgtattttttttaattaacagatatatgtattcaagttctccaaattacatgccacagcttgcatattacaggacagctgccatgctccagatgtaggcaataaccagaacatggtaatggcaaaatgcaaaagaaagaaagggggaagaaaagaagaaaagaaggaaaggctaatgtatcaggacggagaagagcaatttcaatcaatgggtttggattttttacagagatgaataccttagattctcccaaattttcagctcagtttgaacatttgggatgaagctgtctgggtcattcattgctgccatcaaaggctcaccagcgccttgtaaaagcagattacagatgaaatggggcacatataaatgctaacagcgtgctggagaaactattcaaattgctcctgtttacaagtgccctattaaatgtgctcagctcctcctgaagaaagctgctctaagctgggtaaactgctatatttattttgcccatttataacacggcagccccttttggtcactcaatcccaggtgcaggctctgtctggtatccacaaatcaggaactctacaggatggggctctgcagtgagaaaggggcaggggcagtagatgaaagtcccagtcccacacctaccaactagcttactgtgtgactctaggaaaaggactgtacctctctgagactcagttccctcatctgtaaaaaacggggcatgactggacaacctctgaggtcccttcgactctccaggttaggagtggttacatttttgagtatctctgcagatacgggaaaaccctgcctctccttgcatagatgtcagaagtaacacttcaggcgggggcgtctgaggttcgcgtgtgagggaatcaggtgcattgcacagtcatctcctgctcaagacagaggagggcgctcaggggccaatcaaacgacttctaaaccgcgaaaacaggcctggggcaaaagagtccgtagataccgcagtcaaggggcgattcactccatttactgacacaatagacatggagtgcctcccatggacacagggaatgaagggatagacagatgtcctatctttgggaatgctggccttccaaggagagagttgtccactggggaaaacgcctgggcaattccctgcagtgtggcaggtgtgaaggtggaggtaagtttggggtgctatgggaactcagaggagggaaaaaagccactgaggaggtgacacccagcggtatctggaagaatgaacaggtgtgaaccaggggaagagggagtaagaacgtctcctgagggcggaggctgtgggtagcaatggagcatggtgtgttcagagccagccaagcaatcccacaggagaacacaagaaatatccccacggcacagcctacccaagtgaataaggcaggaaagacctgtgagaagtgaaaaggctcgggtgaactgtgatggtagccatgatgcttttccacgcccttgatgacacaggcttatttgaataattttgcagtgggacctggctcacttttgtagatcccttcaaagctggagattggtgccttccgggattctgccattgaaggaaggaaaaaggtagcagacagcctttcccttctcttctcctttctctctactctgcatggaaatgcaaaatgctggagtccaaacacattcataaaataattttgtagggctggtagttagttccagcaaaaccattgaggggaaacaaaggaagttttgtgttaatgtgactagtgtatgactctatctgagttaagacaacgcaatacgaaagaaaatctggctaaaattagccttcttctaccagtcacagccaagctgccctaggttgtcacctagggacggaacaggaaaatgcagcctctctaccactgcccctgccccctcagggatatatcatgcatttgaaaaattctttcttctttcagtttttcgctcttcacagctcagttaattccacttaagacactcttgtttccccgtatttttactcatttcctttggtttcctttttgtttttcttaatttgagctttctcaggaagttctcttcttttccttcttttcttccctttcttttctctctcacattatcttgtttatgaaacactgctctttattaaacactacattaaacacaaataggtaggcataaggttaagtgatagttgtgccaataaacagaagaccctaggtgtgtagcgacattagacaaaaagtaaccagtaccatcaatctttaaaacccctacagtgccctgtcaaccccacagagggtccagaaaaaagtcatgaattgtaccagtatattgtcatctaaggaaatctgatttttattaagtatcaaatcacagaacacgtttgcttttacttttgtgtactcagttaccgaattgctaatgaatttactaatgttgtgatgggattttttctattatatgtaaaatgataaacatacagcatttcaaccacatccctagttaagtaaaattttgtgaattagtgaaggaactccatttaatttagaacattgcttccatgagaacaaggttttcctagtttcaaataagtgatatctaaggacccatagaaacacttgcaaattaggatccaatgaggctcacctgctgccaggtatctacgcagcaggagaaccacaaacagaagcacatggcggtgctatggcttctcccccacccaccagtctcccttacagtagctgcgaggtgcacaggtagttttaggatttaacatgtttagtaaacattgcttttccattttccttttatttattgttccccactctcaacagtgtttgccttccttcccatctcttgtcatttccctcaaagaagcagattcttatttaggtggtttttgactatttacgagtacaaagtattatctacatttctgatgacatgaattccagaaacaaaactgaataaacattatgaaaagggtaatgtttgggaggttaaaccattagtgaaaaatcatcaaggtatgcttctgattcttgaatgaatagaggtgacagaggcaactcattcagtgccccagttttcccagctataacctgagaataatgatctttatctaaaagattgtaatcattacaaattgcttggaaattctgaagagataacagctaggtgtgaaaatgagagttgtagaaaccactgggagctggacagggtttttatgttctgttcggggtgttgtcttcccaggctgtcatttgacctttggcatcattgagtctctctcttactgagttcggcacccataaaaatatgatcacattacattaactcagcagtcctataggagagtgagttcctgtcgtgagagcactgaaaggaaccacagaaatgaaaatatcatcagtccgattcttcactttgggccctatgtaagatattattagggaaggaacttgtcataaatcgtctgtaacccaaattagcaaagggcatcgaagacggtcctctgaatctttcctatagtccattcaaaaagcttgcagggaagaggcaggaaaatcttgcttattttgattcacttgcattgattttccaaataagcctgttctgggtgacttgggctgagtgcttggtacagaaaagatgacaagcaactgaactcaaggaggtaagagcaatgtcagaaaaatccattcagtccaggatagacagattagtgtttgtgaatttacatggccctttatccaattcataactataaacccactgctgcagaagtgacacacaagctcatctgatttctcttgtttggaaagttgaaatctccggatgagttagagggcatgatgcttcagtgcctttttcactggaaaatatcacagggtaaaatgaatttgtacattttccctagacctggtgcctatgcaagagggtctggtagagagagagagagagagagagagagagagagagaggactgtgcatacacatttccacacacactgatctcccccaggaatcagggtaaaagtctccagatgtgtcagggtggatatttgctataccttttggcttcctagattgggggtaaattattccctctatgagtctttgtggaaacaaggactccttcccactctatgcaaaagctgacaaattccaatcttagcttttccagcctcccttgcagctagagtgcaagccaccatgattccgtcactgctaatctgacccactttccaggcccagccacaggacttagtgatgctgagaaaagggtaggccaatattccttccagcagagctggctgctgtggaaagatcaacacagtcacgttactgaaggagcaggcattctgaccacggtctgggatattatttaggccaccacagagcctggctcctcagctcttctgacatgcccaatgttgttttccatttaaatcagccagttggcttctgttgcttgccattaaagaccctgcctgacaccgtgtccgtatttgattgcgtgtatgccacatgtatgtacacacaccttctcttccttccctacatattcttctttccttaccttgatcaatgttatggtgcacctagctaaaaacaactgcagaggaataaaaaggaaaaaaagtcattttttcattttccgccatcgtgcacataaaaagggacagaaaagaacgaacaatgtgctgctctggttgagttgatagccttaaattctactcaccctttcactcaaggaggacgccagccaaagtcaatgggaattatatttgtataactaagggcattgctgaacccagagagactggagaacaatttagcagacaacttattccactgccaactctaagttttgaggaaaaaaaaaaaaaaaaaaaagacagaaattgagtcccgaggccaatctgcatgagcatgttagtcacgggtttctgaataacaggctgaatggccctggcatacaattccactcatttttatgctgagggagtcttcttagggcttctatatcaccaagattacagtcccatattgccaagttcaagctgacccaaccaatgtagacttagcctcaggggccaccattcagttgcatagagagctgcctaaggcatgcattccttctctgtgtgaaggccaagggactgcaggggtcaggggaatcaagtcatgaggggataaggtcaactacttggaagtgatgaagagttctggctgctgctgaaatcattgttcagagcttaggtctagatccatttctgttacagactatcatggtgaccctaagaaagtcacttcacctctctgaatctcaagtcacttgtctgtaaacagaactagcagaaatggcgtgaatttaggagacagaaaactcaacttcagaacttcagttttgttatttacaagtttgtgatcttgggcaagcaactcaatagcatttttatttcagcatctgtaaaacaagaataataatactttttacagagtttggaagaattaagagtaatgatatacacaaagtatgcactacactgcttggcaaggagggactcaataaatgttagttgcattcattcatccattcatcaaatatttattgttgctcccactgtgccaggtactattgaaatcctgggaatatagcaatttatgtgacagataatgtcctttccttcccttgtggtacttgcattttctctccctaccagaagagtgagattcatgttccaagggcaagactagggctcatgttttctttagttgtcctgtgtgctccctgagggcaggtgccacatctagctctgctttctgtgcataggaggtactcattgcacgttaggggttgaattcagttacataagatgcaaaatattgcaaatgccatctccacaagtaaaacatttaaagcactttatgcaacatgcttccacagacttgtccatctctttgtttcaaatgtttactcctcttttctatagagctcatcaccatctttcctttcctatctagacctctctgacttcattatttctgtgctgtagtcaaataatgttttcaataacagtcatgcatcacttaacggagatacgttctgagaaatgcattgttaggggactttgtctttgtgtaagcatcatagagtacacttacaccaacttagatggtgtagcctattacacacctaggctacatggtatagcccgttacacacctaggctacatggtatagcccgttacacacctaggctacatgatatagcccgttacacacctaggctacatggtatagcccattacacacctaggctacatggtatagcccgttacacacctaggctacatggtatagcccgttacacacctaggctacatggtatagcccgttacacacctaggctacatggtatagcctgttacacacctaggctacatggtatagcctgttacacacctaggttacatgtatagcctgttgctccagtctacaaggtttggctctatcacccaagctggagtgcagtggcacgttctcagttcaccacaacttctgcttcccgggctcaagtcttcctcccacctcagcctcctgagtagctgggactacaggtgtgcaccaccatgcctggctaatttttgtatatatttttaaaggcttaatgtgacttatttatttatgtatgtatttatttatgatggagtcttgctctgtcacccaggctggagtgcagtggctaatttttgtattttttgtagaggtggggtttcaccatgttgcctaggctggtctcgaactctggagctcaagcaatctgcctgcctctgtctccgaagtgctgggattacaggtgtgagccactgcgcctggcctcaaaacactattattatcttataagaccaccgtcatatatgcagtcggtccttgaccaacagctatgtggcacctaactgtattgtacttcttcaactgagtggtaagaatgtgaaaatcctggaggtcaccttagttgaggctttcttccaattcagcaaacccctttatgtcatctctgatgcactattatccatcctccatgtcaagacagctgtgaatagagggttgactgcccacaaggcccacttacttcatgttcacaaagctttcattcttgcaaggttctttctcctacccccctgaaatttccttaaataagtatttgctgaccacctactgtgtgccagaaccatattcacaaccaggggtacagaagtgggactaccagtattcctaccctccagtagctgctagtccagtggaagatttgttgattagaattctgctctctccacataaaagaggcttgttatataactgaggacagttatagtgttctcttctaagccagttttctttaagaatgacagtcacctgggatggtagttcaattgcaattttctgggccctcctggaactaattaatcagactctctacaaatctagggactggagcagctagaatcttcaagtttaaaaaagcaccccagttgattctcatgcacaataagcctgaagaactcctaagtcttgcttttctgccttaataatgctaagttcgctaagttcctcccaccttcctcatattacataattcccaggtttttcttttccctccctccctccctcccttcctccctcccttcctccctccctccctccctcccttccttccttccctccgtccccatatccaagctttcagtatatgccccagtttgtaaatggctaaggtgtggctctcaggacagagcatacccattccagatgtgggtcacatcagcagagggtgccatgggggtgttagcatcttccagatgaacacatcgctttctacagaggatgctgagaagcacattatttgtcaccatgccacattgttagctcatattgagatttcaataagataacactcctccaattaagaccctgcaatatacctgacagaggaaaatttgtttatcaaatttgtgaataacacaacatcacaaaggagagacagattatgaaattataatgacatattatttttcttaaatgagatgttagcatcacttgcttttagcaagccaaaggttgcttccagggaccacagattattttctgagtgtttatgaaccgttacattaatctcctgcagatttttttctggagatttatatgtttacctgtccactgtttctgaatctactgtcatctacaattttacttttttaaaaagtgtgacatttttccagactctcctattttgcagtatttcttgactattattcacccagaatggtaccaggatcatattttcaaacggtttcagtgttctgggaagttaattttgttgaatctagtaatcagatttgttttaaacataccataagcatcatcattattatagtgatagttaatatttattgaatttttctatgtgtcagataatatgctgtacttgcagcgtatcatttaatctacttaacaaatctatggcatacatactcttgatatgtctacatcatagaagggtaaaggagaggggaggttactactggcataaggttattacttcacggtggagctaggcacttaatccttgatctgggtgactctaaaccaccaacttgtatgatctcttcctgtcacatcccctatctcaagttttaattccttctcaattcagctgatcgtccctcaactatgaacagcacgataggaaagagagtaccaagagagttaagaagaagttctctgtaactgataaacatcatgctgcatttcccaaggaggactgccctttttattcttcttccttcttgaaacctaaaaaaatctctcttttccttttttctttttctgcaggcttcagctccttctgggtcttagtgtcacttggcacctttgttacaggctcctgcacctcttttgtcctcttcttctgccaggtgccccgcctgccatcttttgtacctttttttcaaaactgagctccttggagagtgtctgcgcagtcaggttggtttcttcggatgctgccgccctttccttcttcatcaggatcattcgtttggtgctgtcaaaacactgaagctgccatctttcttgagccacctttctttttcatcacccagcttttcatattgtttattttctactgcctctggcgatgctcctgatcctccaggatcagggtctggccatgcccagtgtcctgtttttattatgaattcctaagattagcatccactttctttcgagattcccattatattaattcaatcattcctgtattctttcaacaagcatttattgaatgcctactatgcacctgtctatttcatcaggtttataccttgttggcacaatgcctggcacatagtgggtgttcgataaatatttgttgaaaaagtgaaaatgagttagacttgagcccagagtgacagagtcccttattgatttttccccaaccttctgaatgatcaagctgcttgtaaggcaattaaaaagtatgtcaagaacactgtttcagcaggaccagccttccaaccagtgtctggagagctgaagttgtcaaccctggctggaactggctcctgtgcctgatgtatggttgatattttggatcaggaaagagcatcaatttcctgtgtaccacacagtcagaggcatccctgtctcctttttcttggtgtcctcactcagtttctgggcacgacatgtcccactctccattgagtggatttctgtagtacgactctgctgccagtctactgacagcctccttctccagcacggcagcccaccaaaagtgcctccttccaagcctgtggccacaagccccagggataatggtcagcacattgtggcgttggatttttctgctacttaaatttatgatgatgcagggcatgcaggtaatcaattatgcgattctttcagggttgcttctgcccttcctcttctccaacattttctttgaaaggtgaccctgctccacttcctctaccaacattcttcctgtgtcagatctgtcctcccctgtggtgggcgtgttcttcaccttcccttcaaactttagccaattaggtttcctccattcttatgtgtggaacctctggaatgaacctgcattcttttctttgttaacccaacccctggcagcaattatgtcctaaaggaaagtcccctggtaacctcaaacaggttgctccctctatcatccaatatattcttgtgtttacgtgccctggccagaaagctttttggcttccaggtctatgcccagtgcattcagccactgatgctccttggttctggccacgcccagctccgtgtgggtccctgagtggtctacgttctcccatgcttcccaggctttagcacctgctactccctcttctcctcatcccgctctctgcccattttcttagctaatgtccactctgccctggagctttgcttcatggtgggagtttctctgagctctgttcccccaaggtgggctaggcaaccctagtgtctgctcccacaggagctaccatatgtggatgtcccctgggtccctacctctctgcacccgggatgcttattctcttacctggcttccctgttatgccctgtgtccctgaatacattgaggtacacctgcctttctgaaagtttggcaggtttcccagtgtgtactgagaaaacaacaagggttgccagaaatgggaaacataatttcaagggggagaatggcaaatgtacaactctccaacaaaactgaactcccaaacacagtgaaaagcgcaaactctcagacaaacagctattaaggacatagagtccgaattcacccggaacaaaagacccgtctataaccattatttatcactcagcaaacactctctttttgttccattgtcaatgctccacagaccacatctgcctttgggcagaggggaaagagagaaagggagagagaaatgaatagaaatgagagtatgagtttcattttatttatttattttacatataaatcagctaatcggtttaacattcatattaaagttgtaatcacctttgcatacattaaaatacaaactagcacaagtaataggccttaagaacaacattacaatagctattaacatataacagctaccttatcaacttacaacatccctataaaataataactgcatccaggattgatttgcgggaaattcattctcccagagcactgaagcctgactcgaagtctggggaaggtgagagtctggttgttctttggctgacgcagagaggtggctcttggggagtgaaggacaccagaggcggagatagaggcttgagctttcgttttggctctattatccactagagagatgacctggggaaaatgtcttaacctcactaagactcagtttcctcgtcagcaaaatagaaataagggtgtttccttcatagtgtttctgtgaaaacttaaatgaaatcataggagaggacctggcctttgtagcagatgcttaagaaacgtcagcatcttttcaagaaaaccaggtgctcttagagggtgcaagggctggaccagaaggatgctacttagaacataatatggtatctttcccattcattcatttgctcactcattaaacatttgttgagcactgtcagagatgatatgaaaaattttaaaacattagagtttctctccttataggacttaccattgagttgggaaaatatcaagtcaagaacaagctggacagaactgaacacatgaaaggatagaatatacacattatgtcggcagagaagaaagggcagagtgactgtgagtgggaaacaggaaatcactacacagagaggtaacctttgagccaagccttgaaatatgaagcgtatttcagtaaatgatgaggaaaaggatattttaagctaagggaacagcataagcaaggatacaaaggcatggcatatccagggaaaatcaaatattctttttctggtggaagcttgaagagcaaggagggatggagaggaagatgctggaaagagagatggtgccagacagaatgaattgatagaacaaatgcaagtatctacagattgtaggggaccttcaaagctgggtaaggatggaggtgtcagataccaagtgaaggtattggggctttgttttacaggcaaagggtagccagtgggcttgctgagaaggggaggagtaaattgtgtaccctatgaagatacaagtggtaatgaatgacaatggtgaagggtgactgtgagaaaaaaaatcgaggaacttgatagggtgctataatagttttggagaacatgagtagggcaatggaaggaaaaatggaaaggcagtatagatccatgtgaaaggcaatagagattaaaacgtgtcatgacaagagaactaattggttatgggagatgagaaagaggctggtgacttggcatccacactaagtgctgggaatataggatgctctttacggagattaggaccccaattggggagaaaataatgagtttagtttttagaatgttgttttaaaagtgatactgggctacatgtgagagcatcaccgatcaggaaaatcaacaactcacaaatatattttcattgttactctcagaattagccaccagaatgggtgctaggagtgtgaacgtggaaagaaccaagattcagttaggacacaataaaataattttgagatcacttagaaattttcatcctcagtacttagcaatgagagatggtatacttagatctctgtaccgtggactatcattattcaatttaaattgctacaaagtactattcttacatgattggcctgaaagccttgatgctgagttctagatatttgaagcctaataccacaaacgtacctctctggacaaactgtcacctggatttttagacaaaagaaggaaagcatggcccgttggaccacagcaagaccttcttatttttgcaagctattctattttatttgttcttagtgttcagcctgggacctaggcaggctacagatgttactgctgatggctgcagtgaccagtatcaagtgatttcttatgagaccctgaagaaggaggctgatggccattgggcccactgacagcatattgcctaatcgccattattctggaggaaaatgctcaggaggtgttatatgtggtgtagcttaggattccaggcagaagacagtccagtaccttcctaagtcactaaggaagagctaaacacatggtccctgtttcactgaaatgagatctgcctctaccacccgactctatgaagcaaaggcaaggaggtatttcttaatctgagaagacatcttgccttttatggcactgttaaaaccacacatttgggtgtcggaggaggtctcagccacacatgctcagggggcttttatcaatgcacccccatccttggagtaggttcctgagcttggtgcctggggaactggggaaggcccccgtttctaccaaagagggcctctctccaaggtgcctcccagctctaggcctgaggtttctgttgacagtgcctggaggagccatctgagcttctgtagcacacactcccttgcttgggggctctgctgggatgacagcctttaaacacctcattaatattcaaatctattcaagtcatttcaatttgaattctatgcatattatcagatagaacaaatgcaaatatatacaaattcatccatatgaagaaataaataggggaagctctgcataatgggattataatcattctcaggcttgtctctttcttttaattccccagagcccagagatccagacccagcctcaatgctcccacctgcaactgtttaacagcaactaaacctttcctggacacaggttcctcaagggctgaacatttgagaaacctattatcattatcaacctattatcaacaaagatgttatcattgtctactggttgcttctctctctgggcttgttaaggtagagctgtcagagacttgtaaggtgggtgtgggcaaggggttggactcagagacccatctgtaggctcaggggctggccctagcctgggcacattggccttcaggcctaacagcctcaagtcttctatggagtcttgatgcatctggtgggaagacactggggaggggactaagttccctaatttcttaaatcttctcaaacctgagggagacttcataaagcctttaaagtacattaactgaacttcaacacctgggcaacaatgagtggcatctaatgttataatcgtatctctcctttgcagcaagacacctaagttgatcctggagctgccacttctcctttacttccacgtactgtttctacccattcccccagcccaacacctccaggcgtgactcttttctagccagatcctcagccaaatgctagaaacacaatgctgtaagcagacaaggagggaaaaatcaaagtgcaggcagtaagcctcctaccctgcagcaaatcatacatggacaaacgcagggtccattcatcctttctttcacactgttgttgttgctcatctctatttcatctcaactactccaaagacaggaggaggccaaggtctatagtattttaaaggagagttctcatactctagactaataaagccaaagtaaattgctgttaagaatcatttagtgaggtttaactacagcatctaatagatgtgcctgctaatctctcccccatgggacccaatgatagttgcatctagtagtaactccattgattatgtaagcgtaatttgtgccaagtcatagtatgatattataataaccattttgtactaagcacctattatttgataatccccatagatatacatggggaaggtcattttttctaacttataagtagtgaggctacttgtaggtacaatattataataaccattttgtactaagcacctattatttgataatcccaatagatacacacgggggaaggtcattttctctaacttacaagtagtgaggctgaggcacagatttcttacacagagaggtaggataggaaagcctatattttcttctgaaagggagggctcatctaacgtctgcctttggttcttgcggtagacagaataatggccgccaaagatgcccatgtcctaatccctttacaggacaaaagggattttgcagatgtaattaagttaaggtcttgagagagagagattttcctaaattaccctctgtggtctgatataatcacttggttccttatgagaaagaagcaggtggatcagagtcagtagtaggtgaggtgaagatggaagcaagaggttggagtgaagggaggaaggggccacgagccaaggagtgtaggcactctgcctctagaagccagaaaaggccaagaaattgattttccctatagcctccagaaagaaacagccctgcagcacctggatgccagcccgtgagatccattctagacctctgacctccagaagctaagatagtacatttgtgttgttttaagccactacgtctgtggtaacatgttaacagcagcactgggaaacaaatacactccatacatagcctttctcaactgagattcctcctctgaaccagagaaccccgagaataatatgattaactatttttacttctcccaaaagtagtacatatctagtatcattttagatgcataggaaataatttaattcattgcatgtaatggatgccttttatggtattagaggttaattctccccatgagccccactgagaaaacttgcacgcccagaaagccacatggcaccttgtcttgaaaagagactgaggatgctaaccagatctattctgaccttgggcagcagctcagcacatctggagacactgacccagaggaaggcaagtacctcacctctgaatagtgcccttcatagagtttcaaagccctcacaaaaaggtattctctctggagattcacaacaacttcatgagtcaaggaggagaaaaaggctccttccctcttccataccaaggccatgcaccaggcaagtgacagagcctgtagcctgtctagcctctgctctagggcttgtgtcacatgcttggaggatgaggagttgtgatgagtgctctatgccttcaagcaggtcttccttgattgacaggggggcagacggacacttcatggcagatgcagtgcaggggggtcacagcctatggacccagtaaaaggttgccctgggaaaagcttccaggccattctcactggctgctgccaggtgctaagtccttactataatggagttattatgttctctttgttatgcctcatttacaagagagggcctcagtcaagagcagttttcccctagcctctgcacagagacccttgtgccatagttggaatcaaccaccactttttaccaggaactttgtccaagctccccgcacaaattgctctcctgcctctcaatgaagtattcactccaccaagctccatgtgagcccgcaggaagtgcccccaggagcttcctctgccaagaaccctctaagcacatactcttcgggggcaggaacccagggaggagacctggaggagggaaatggaagaaccctgggcttggatttgaactcctgggttttcattttaactttcccacccactacctgtatgactttagagaggccacttaaaataacctggccttattttccttactttttaaaggcaggataagagttgattcagggaggaagaccataattaatgtgaaagtgttctggaactatgaaatactatacacatgcaaggaaggattaaattattatcaccttttccccaaggaggactcggtgctcataggtactcgagttgtacaaggcaataataatgataaatagagcacgttctctgatgaaacactttcatgggtttgcaagtgaaatgctgggcacggaaaggtaggagttgtccagaatccctgacacattatgctcttttcccatgtaagaaatactgattgtatctgactctgcgcccaagtccaacaaagccactgcacggtagatggaggtgagaaggacccagccctggccgccaggaagctcacaatatggaagggaaggcggaccagaaacactccatgtggataaatcatagtaagagccacaaaaggcttcctggggcgctgtggaataaggaaggaagggcatttaaattagattgtggggagagaggtcaaggaaacttccaccaggaggcaaaaggagctgagtctttagggtagaagttatctagactaacctgggggagaggagacggccactccagagggacaggaggcacgagggagcagagcacattcggacaatgtcagcggctccgtgtgttggagtaaaggggcatatgagagggtggggagactttcattctgagactctttgtcctgaaggtgtcgggatgctgtcaaaggaacgtacacccatgagaagatagcgaactctgtgcaaagctgatgatttggttattgtcacagcggagctactgacatagttcaatgatgaaaggaaacttcaaaaccttgagtataaggcatgtgccttcatgacccccctactggatgggagagagttaaagctgttgtttctggacactatatagcctagtgatctcctgaagcctaaaatgagtatctcacaaacacgccagctcacttagtctttctgtttctctgtctctcctctctggcctgtacaatccaccacctgtgcctttcccccttcctctaccatcactacagtactcagccacctggggatgcacacagggtgtacacggcatccactgtgggatgagggggcctttaaatctgtggctggctccccccaagcccctcttggttgctgggttcatcagctcatgcatttggtttcccattggtgagttgggttgaaaaaagaggcccagatgcctagtgatgagaacatttttttttatgaattgaaaaataaaatgacaataagcagctagcagatcccagttcacaatgaagtgaatatcaatacttgtggttgtattgaccttgaatatttttttaaaaatacagagcaagaattctcggggtgcattattatatacattctgaatctcttcactgtacaaaacagaaaatctatcctttatggacaagagcatctctggtgtacagcattgactttaaaatcaactttctaaagtgcaggtagaagaaaatctatggctactcttagagacattcttccctgtcaacatagattatgacattgcttccctgggttccactggggtgggacagggaggaaagccctgctgaaaggaagcactcttgatttctttccagttgtgagaggaaggcaatgatgtcagtgacggattggcatagctgctgtgttccacatcataggtatgaccttatcgtaagtttggcttcttatgcccaggacagatcccgattcctgatgtaacatgaaaacatgagaggcagctcccacgagtcaccttaaattctctggttagaaagtgactttcgactcccttgtagacttactatcagcagtgtccacatggaggtgaaaatgaggggacaccataaggaagcaagactcagccttgatggcacctgtgctccaagctgagcaggcctcaggagcagctggtgggctcggtataacacaggctgctggtcaaaacccttctgatgtagaaggtctggactggggtccaaaaatggggatttctaacaatctccaagttgacctgcagaccacacttgaagaaccacggtgatagagaatctacgaactcagataacccaggaaccatagaaagaccctaatacttccttgatatgtgagataattacctgtcaggaacacgcaaagggagtctacacctagaattaaggggatacactgacccacaaagattccttttccattgcaattgtgagtgagcaaatctagcagagtctatagtacgcataaagtcaacaatgaacaagactaagacaatttaactaaaaaatacaaccgtctatgtattttcaaactttccttggcatgaatacaatggcatggatcttagaatatctgttgataataagagtgaaaggtagatttcctgttattttcacagacaaacaggagaggtaagtgttcagattttctggttggtatgtcttgattctgaccagttccagtattcagctgttttcacctgtaaagtatggatttctctctgcaaaaacctctgtcccaatctgatgaagagaacacccaaaacaaagctcatgcccagagaaaggagcattgatatggatttggaacccaggcatcagctgccaaggctctgttgatatgacggcatgtcccactgaagtaaaaagaaggcatttgaagtattctatgcagagatctatcttccttgcattcctcctctgtattgctctgattcgatctaaaggagctttgaaaacgtcaaagaactttcatgttttgctagtttatcataagtgtctatcttaaaccaatattacaattttaagcatggcctgggtagacatgtgccatcttctaaaatgatttctgacacaaggtaagttgtaccagccgagaccaaagtgaaaagaatcataggctctatgacactcaggctctcctacattctaagagtctttttatttccccctaataaccattattaatcatttcagaaacacgtaatctcctgatatttttactattctagacttgacagaaaaggagggttttgaagttctggaaagtctttttatgtagagtagctccattcttccagcacacagctaccacaaggctcaactctccctaagcagaatgggatttatttatttatttcttaatccactgaagggaagctgggtgatgatgaattcttttaaagaaatcagcatttggctttcaaaatgttaagctatactggaagtgggttgtggaggcagagagcagtcgctagccatggaggaaagcttctcaaattcttactcagcttttgtttgggggaagaggttttcttccatttttatcagctctccgtcccaaatcctacaagctatgaaggaggggacccaccggccagggcaggggtttctgtggcttgctgatggtcacacggctgtcgggacaccagtatttctgaaatccttcctgaagaatttcagaaaaaagaatttcagaaatactggtgcctccacagccgtgtcgagggcacaggtgggcataggcctggaggtggctcctgaatggagcagcagcaagggctgtaaggggtctgcacaagggtgtttgattggcaggtctttgactctccagtcgaatgaccttcaggcaagttaccgaatctgtctaagcctcagtagttttcatcggcaaatgggtctaaggatccctactttattagattgctaggggatggaataagggaatgcatgcaaaactcagcagtgggcctggccacaggcctcagtaccatctccccgtggctggtccccattcagcaatcacaaggcttcgggggtagagaaacatgctgaggccagcacactgaaaccattacaggttttgatttttttttctcaccactctcctccctcctcagttcagctttctattaaggtatcccaaaacactaacgcagctcttggtgaaaggagaaagggaaaaagtggccaaatcaaggggtcgggggacagcagggccaaggtcaaacacctcgttggtataacatcttttaatttgaggaggagctcagtccccattattttcagtaaattctcaaactatgcagctctatgtttcctcttctacccttgtagcatcaactctgcagtttgaagtaaggttttgcaaaacttatgcaaaaagttttcttttctacaagagatgctgaagaagtcacctggaatttgctagtagaactatcagtaaaatgaagacagcaatcctgccttcagcccaactccactgcccagaaaggctggcactgtggggacgaagggggcagtggcagctcaccctgatgcagagagagcggcaagggactctgatggtgagtcagctgagggaagctgctggggtctcagcacaccgtatagaaaatccctccagcaacttcagaaaaactgaatgaaaggccaaaggtaacataaaccgccagctctaccaaccactcaggctgcagaccagacaagggagtggattgttcccatggtggctgcacctttccttcattctattcccgctatcttagttcacgctgcctgtggatcaactcgggatctcagacacatctcgtcacaattatcaagtggcaaaaaaggtgagccgccatccccttggaggtaaagaaaggcatgacgaagtcttagggccaacaggggaacgaagtcttagggccaacagggttcccccggtgtctctcctgcagcatgaaggccattgtttccagggcctgtggccaggatccagttatcttgcctggaaggatgttcaaacagccatggcccgtggtggttttttataatggtgttgttggaaattagtaataccatccagaggtgaaaacagagtagcacctccacagcctgcccaggagatcaggaataatgaagcctcattttagcatctgtttgttttgttttttcagcatttgcggggaatgacaacagaaatattggctccctgaccctggaagggtggaatcactccttgtggaagggaaaacgcctggagcggggcagggggcacaggcctggaggcggctctagggagaggtaggggctctgggctggcggtccccctgctggggaggactcaccttcacatacaggagagaaacatcatccctgtggcagggaaacccgtgtggtgggctgagcttcctcgctccctctctttgaagctctctcaagcccctctgagcatttgcaattgtacccccttagctgctgccacccttcatccggatcccctcaaacactccaccctcacaccctgcagaatcaggagagaggaacccgcctcctgcgagagccgccgccatctgtaacgttgccctcaccacccagaggcgaggaggagagccccccatccctcccgtcccttcccagctcccggcagccactaggctttccccttccccgtcctaagggacctcccgggctctgctctctctgggcaggttcagggctttgcaagcgctgctgctgccaccatcaggctgactgaggcactgcagccttcacctggcgtcagggcccaaaatagtgccccagctcttggtgcggcttcagaagaacagctcctctctgcctccgcagttgcccctcactcaggtgcagcttcctatgtaagaaaaaggcttcagagggcatctccctgaagaaacagaactccttgtgaatgtggggtggaccccagcgtcctctagcaagacgcagaaaaagtgcaggtcctaggatttagggaacgcaaccactgagggattaagtggtggttttgctttctttgccacaaggtcagtgaggcagggaagggtgggaatcactcctcctgccactcccggatgaacgtgctaagcttcctgtgcaatgaaccaaccgggccccagtgttactctgaagctgtcattgctcccagcattgccaagggtgacaggtggactgtcacactgcaccagagccgagtcacctgtgacatttgcaggtgactgacagaaatgggcactgacatgcattaaagaacagaaggacgcgatggtttcctgttgaagctgagcagtgggtggcttggcagaggctgtttctcttggcgttgtctctggtgacccaaagggcattcaaagccttccagaaaggaacaacttcctgcagggcacgtccacacttcacttagtcaggttcttcttctgcctcctgccaggggccctctcagcatctctccatgtgctgatattacaagcactgctggcttctcctctcattacccctcattccattccaatatttccacacttattcacagccttctatgtgcccaatagtgtgctagacaccaggggtgataaaagacttggattttaatcaaccaattaagagaagcaaagtccctgcctttgcttccttcctttttattattattattattattatttgtcagaacagccacaaaaggagctactcaagcagtatgtccttaattactcttcagccccaaagcctggcctgttatttcctctggaaactttgtaccccgaggtaaaactgaatgccagaaagataaagaaactgactcagaaagagtctggaataaaaaagaaattgaactacaatgctgcctccttgttcgaaggtcagacctgggattcggatgcatgattttcataggaaactccctaaaatccttttccagtcctagacactggggattgccacaaattataagactatgacctgtcttatgacaccacagcttaggatactctcctgcattttttagtgttgatgtggaacagctggatgtaccagcatcttgaggaacatcaaggcacatgaataagtgaaccagactgaaaatgactttagtcaagcaaagtaacctctctgggggtatgacagcaataatgcccacttctcattacttctgctgatgaaatgaggtagtgcttgtgaaagccactctgcaacttatgaagctttacacaaatgctagttatcatcaccatcatcatcataagaacataattactgccacgactaacaacaccctcaacaaccaaaagaatttgccaggcacctacaagaaaatttgctggcaaagagcaaatagaatgcatcacctactccctaggaatgtgtcatccaaaataaatagattgttgctaagagataatattcagagaatcttacagttggagaggttttggacgtcatctagtctactctctaacccatttctcaggaattgactcctacattcctgatggcctgaattccaccgtgagtcagaacactctcagcaatgagagactgttcagtgggccagccttagacttgagacttacatatccgcagtcatggaaataacactgtctatttcttgctgaacaatcggggttttgcttcatcattgagcttgtcctgccagcctccaccagttcctgaagagaacaggccaaagtgtggaacatacaggtagatctgatgatattctctactcttaaatggaagggtactcagtgccagagccttgtaaaacatttccaacatcttctgagtagaattgtttcacttgtaaccttggtttccctaaagccagtataacttagcttcctcttgagaacaagaaagacatcatcagcaaaatgtccctaggtttttgtgctcacctgctccagtgctgtttcctcttctggttagcacccatcttcaatgttaggctgcctgcgcctctaactagccaaggggatccacaaactggcaaatctcattcctcaatgcactctttctgctcaagtccagcgtgcagccagcagtcctgcctctgtgtgtttccatgatcttttttcttctcttccacattctttagctaacacatcattctggcattcatctacccaccatccttctgtgcctcctctctggaatgtggactaaccattaaggtcagttccccccatacttattctcttgctcacttcatccatcagctagaaagaacgattaaaaagtatatttccattcaattttacatttttagccccatgtgaaacacaagaaataccaagaagtaaaaataacatgttgatccctaaacccgtgatgtagagaggaccacaaacccataggctactagcaatgtttctcaggtgtttacttaattatctcaatccatcctcaaaagatgtataatggcacccatggccattcacgagttgactcttcccttcccaaccttcctctcccacttccctaacacagcagcactctagccatcatactgcccatggcttctgaacatatcgcattctgttctgccttttgtatttgcatacactgtaaggtatgtaagagactggaaatcgcttttcatgcttcgtttagagaactcttgagcatcctataatatcaagcatgatgtcatctcctctgtgcaaccttttctgatgcctttgctgatccacctgttttcagaacactctgacagctctgaacccatcatattgtaaccttaatcgaagtgtctgctccccaaccagactaagagctctggggcagaaacatggtcttcattatctttgcatcaaaagccccagcacagtgcctactgcataggaggcccacagtgagtgctggctgagtggtcaagggctgagccttagtgtcataaaatggtatttgatcacaaaggaaggagcagcatatttcacccactgagacactagactatgtggagcccctgggggaaaatgtggaatagtgacagcgatgtttgtttgttattgctgcaactcttggcctcagatttcagattccagttgtccaggcataagttaaaaagaatctgcataagttaaaaagaaacttgcaacaacaatccactgaatacaggccaagtgagcagaccatctagataattcagcatgatgcgcacacatcctttcttatactgacatacataggccatccattgcagttttagtttcaattatcaaaaaaaaaaaatcagcctcagataaatctactttgctttgcctatgaagacaggcaaagagtagggtgagagcatagctcccatttgagaaaagtggctgattctggagatatcacactgatttaacattaagtggtgtgtgcgtgtgtgtgtgtgtatgtgttcagtagggggtcaggagggcgtgggaaggcttccagatgccaggaaaaacctgtccaggggatgcaggcaggtgtctgtgtttggctgccccctttgcagttatttccaaggagaagaaggatgacttcctctttccacccttcatgccccaacagaacagctccacacagagcagattcacctatgctggccattatttccatggctttaacttgttaccaagtatgccaaggaatagctgacatttatttaatgttcatagtggtgttgactgtgtacgcactgaaacattgtatgcttatggaagacatttgtttccaagcagcttatgctaaattgcagtgatataaaggaaacacttatccaatattgacatttaccaacttctagaagtatacagccagaatactcatttttaccactgggagaggagaaaaagaattaaaaagcataatggtcctagctccttcagtgagttagaagctatgagtgaatgaaagttaacgtgcagtagggggaggttcaatgggggagaagatcccccaccctcttgtgacccttggctctatggcacagtgtgctttctgagaggactgaagcccttccgtgcttcataataaagctttggcagatggcaggacatagcatcccttccccaaccatgagagaagtattctgatgatctataaggtatctatgttcttacttgacctgcacttctaactgggtaaattctgactttctcttgggaaaagaaaatgacatgcaatgacgtatggaacagtactgtgtctcggtgcagtcgattctcacatcattcctctaactggaaataaaaatcccactctacttggaatacaggatgaagcgattacaacctgggcgcagtatactggctggctttgctgctcactcccttacgaatagctgtgatgggatatgaaatccaagggaactgttagccccccagagcagctgctcccaccgaccctgctccaagagtgctgggatgtccgctggcctcgaggcaagacaagagctccaatcactctgctgcaagcgccaccattaaagtcaagatcactgtggtggggggagttgaagtgtgcattccagcatgctcatgatcttactgaccttctccactgatgaattagaacacccctcttcccaggcacaggacgagttcagtgcctctctgtttcttgatggaccccaataaaaaaacgcctgcactgtttttcacctaaggtcatctcgacaatttacaaggataaggattgtagctgcaaaataatgcctatgcccctctagcccccttagcatcccccatctatatcaagaccataaaaccagtgcttttggccctcctcctcactcctccagtatgggcaattttcttttcctcatccatgtttccaaaacagtttatctttttatctccttggaagaaaagtactccacaaatcaaaggtatcattagtattgttattattttgctattgaaatctcttcaattcgctctggattattcatgtgcttttttgggtctgcaatataatgctgcctaagtcatccccactgggctgaacaaaaaagaaaaactgcatcttcgggcctaatctcctgctccaccccatctcctgctggccctggcttccaccaacacaggcacacaccaggcagggctgcttcttggtaccatgcctagcttgccgctgcctgttccaagccaaatcctcctctgtacacccaagagggggaccccatggtatcctcttagagcaatgtgaaggccttgaccccaccccactcgtcctccccctagggactttcttttccatcctcaataggtctggctggcaactgaggactccctactgggatacagacatgcaaccacccccatttccaacagacatgccccagtttccccacccgaagatttgttaaagaagtggtcccacacccttggcagctgtgtattgaccttctggcacaaaagaactgattcttcttcctctagacaagacgtcatcccacatggggttctggtaggagggagaaacacacattacttccctcatcttttgttttatgacatttctgagtgagtgtaagtgtttccaaagttgctgttcactccccactttgtttgctgattccttctctgcctgtaccccctatgatccctccattctttaggccacctctgatgtgttcaggctctcttccgatgcctccccaaccctgcccctcccaagggaactccttgctagttcaagcctcttgaagtggctcctccttttccatgcttcttgtcatctccatggctcccttcaccctggctggctccctctgttcactctattttacccttctgtctacgagatgcctttctattccctaggagattcagatcaccatgaccctctgccctctgacagctgctgacagccccttttggtgtttccagccaggcaggagagcaagtgggctgcttagattcttcccagtagggagatggtacctcaaatgcatccttagctcagggatgccattaacaggtaaatgcaagttttcacttttaccccaatacagtacagtgtgcatgcaaagccaaaagatctgggttcagcagaattagaaccttcacaaccacagaatcacaaggcaggacaggacgctctaggaatgccagagcaaaatgccagagagtagggaagagaccacctttcttaagagcgagtgtctggagtagaaggcgccaagttcttgccactgtggctcccctgtctatctcccctgtctccgaggtggagatcagagatctccctggaggcagggagtcatcagtcctctaggaccttattccctccaagctacctaagctgtgcatgtgcaggctggatgggatggggcttgaagcttaaggagggcacagaaggaaatagttgtgggtgaactgaaatgataaagaggaaaaaatatagcaagttctaagtttatggatgacaaaagaatcgattattttttcacccaggggcagaacatgtctattctcagcaggaggcaaattgtgctgtgacattatccctctctgaacaaagcatgaccgtcctgacagctgagggaagaggcatccacggcaagggagaagcccacaagcagtacacactggcagctctccattcccttgttgggagccaggcctggggactctggcgggggtggaatcgggaggaatgttatttagccttactactgccaccttaagaaagataaagaaatacttgatctcaatctacatgaaaagcccaaactttcaaagaatagggacccaccatattactgatattaattatacattgatttctgttctctgtctctctaaaaggttataagaaaaagtaaaggtaaacaaacatttgacaaattaggaagaaaaggatggctggaacggactttaagagtttatttgtatcttgagagcactgcttggagcactctctctgcacggggaccaagatactgggagcatggagcttgggaatcttgttcccagaaactcctaagtgccatgcagattcccactgtgagatgtgttggacagcagatggccatgtcatcggagtgccagataaggcactaaaaacaaccctggacatttgttgtctctgagggaaaggccatcccctgggtctcttcacatttcctgggagaggcatcccagcatgcaggaggcaggggtcaagcaggtggctgtgtgagggtgccgggtgggggggtgtaacctcaggcctcattctgggggatcacagtggagccatttagagccatgtgggctagacctcccaggacctgttagacatggatgcgttctatccaataagttgatgaatgcatgacactgggtagaggtggggcacagtacatgagctaagcatatatgtgaggatggtcaaatagaatcctctggggaattcataatgctcaaaacaacatccacataaacaaatttccacagatcaaggcaaaagataaccatatcacattgcagtgaagtccataaaacaccttcccacttgatggctggaccccttgattcccatagtcggacactgtctattcaagaagcacaccatgtacagggatgcagggtatctgaccagccatgtccacttgggtctcctcatttttgtttagacctgttttccagcctctggaccaggtatctaccatttggtagggtggacagtgatggccaagctcagaacactccaggagcacaaggcattaagaactgcatgatgttatggtttcttcctagcgctctcaggactcggggtagataaaacagagcatttaacctccataggtaaatatttaaagattcacatgaagcagtcaagaaacagctccagaccaagaaagaaataagcacaacagaagatgtacactgtaatgattcagacggccagggaggtacttagacacctatagccttcttatgccaatctacataagtatcacggatcaagcttctaactacacaaaaggctgattaaagcatgcactggtcccatgcaaatgtgagtttgtgtgtttacggggggttggttggaagattccctccttctcaggggttctatatcaaaacttcctgagtgaactggtaagaagcaaagacgaatgggagtgtgtgtgtgtgtgtgtgtgtgtgtgtgtgtgtgtgtgtgctcataagcaagcacatacacatccaagaaagagggtaatcttaccaaatggtaatataactgaacctgtctctataccagtgttctgagagagttcttattcattcagcctgaaactctggggaaggcaatttatcttcctgctgctgtagggagccttggtgagaagcacacaaccatatgaatacatgagtgtgtgtgtgtgtgtgtgtgtacatacattatcattatacacaggcattagtatgcacatacaaatatgaagaaggagccccttcggtttcatcaggaggaccagaagcaaagtttgaactgcacagataaggagaaagtctgcagtgaccacaagcacgggtggaagagcagaagaaggaagccaggtttttgcttatatttggcttctccccgacaggggagaaacagaagacatgctgtttgcttgcaaagccagccacccatggcagtgctttgctttctcgaaaacttttacccttcatttaatcaacagatggacgtgctctgttgtggattttttctgagtcttgcacctctaagagctgtgttggctggcacaaatgcagcctcagatggcagaggtgcattggcattccaaaagagcgggaaggagcccatgtacttgcccctccaaactcaattccacaggtgacttttgatgcctttggccaactaggcactcacattccctctcccgaatttccctctcctttctgcaccactaccagccccagggctcccagtggcaaggagcctagaggtggcaaagttctttccggagagtccacctgcttctctgcccctgctaggctgcagaaaggaaaccatcagcaccacgggcgaaatttcattttataccctgaattcagtgctgtgtaggattcagaattcaacctaatttagggaactcgatgacgttcaatgaaactctttacaagcttttcccaaccactgcaaattaccccccacaatacattctgtaattgcaacccccttttcaacggtgcaaaccacacacattcgcttttgaatacacttgtgcaagtcaaaccctattcaagctgaaatatccacctaaaccaagctctccctccctgccgtctccttccctggcctgggtctgaaggagaggaggtgcccagaagttcagagcggcataaccacagagatactacctaattaacataccagaagcataaagaactcatttgcattggagagtttgagctggatattgacaagtgagaggagaaagtcattcccctcccctcccataccccttctttccaaaggaaaataaacagtaccattttgttgcattcgcaaaggcgaagaggcaatgccagagcatctcagcccggcaccgagagacgcatccatcagtccgagttcccgaagcctgcccacgttcctgcccacagcctcccgcgccctgacaacccagccgactttcttccaactccagcagcgcaggggtcctaccttgactgaagaggaagaagcagacgaagagcagatcgagctggaagggtttcattccttagcgcagcgaaggaaagccggcggggtaacttggctgtggttagtttctcttccttggcggctctcggtgctcagcctccgccggtcctctcgggttcgcgcctaccatctgtccgtccgtgggtccctccgggtggcttcggtctctttgtgcctctgggtatctgcagccagccgacacaaactgcctgttcttagccgcctcgggaagccgggattgtcagcaatgtccccactcggagaagatccattctctggctcttggcatcccaggcacacggcttcctcaggcgggctcctcccacagtgagcgagcgagctagtgacgagtgacagaaggactcctttcactgaagctgaggcgaggggagagggaggggagacaggtcataattaaagaggaaacactcggaaaaaggagatctatgcaaaacggacagtgggggaaaaggctgtgttctttcttttccctaaatagggaaaaattcagcttttgtcaccattattgaccaaaaggcatcttgagcttggagtggagctgtgactttttgtccacacgatgtcctgtttaacagtgaagttaaggatgactatccacatgcatgtgcacaaaaacatgcacgccctgcctttgcaaaggaactggaaactgggctgaaagggaactaggaagggggggtgcgcatctttccctcggaaggacttggccaatgtgtgcagcgggaggctcggagttggagaagagataagcatgctttgcatttctgagagtttcctgtgggtgggtgggtggttgtggtggggggggggggtaggtaataaaacctgaacatttggatcttagttgctttgcactgctcctggaagacaaaatgcaggaactaaagggaaggcaagtaggcttgtgacacacacccatttattatcattatcctggtttgtgcatttcctaacgaggacaggggagcagcctgtctttgcattcagagcctctcctctaatgagcgctccatcactctgagcctgtcttttctccaagaggtgctgtgagtccaattgcaaaggagaggccaaggtcatagacaactgcgtcctaaggatcttcaagccttttacctgtcatgaaattcacactccacactcaaatcaaactcggtttcctccaggatatcaacatgaatttatctgggtctatttacttaatagacatttaggcatgcttggtataagcaggccatggagggaagcaaaataataggcacagaccatgccttcagaagctcataatctagtgtgcaagcagagtacacacacaagatgcaaactctaaggacataacaaaacaacacagaaaaatattcaacgttatgcactgtgagaaggagaggtaaagagagaggagaggaaaatgaaagacgctcccctgacatgtgccatttagcattcaattctaaaatcagtcattactgtcttcagtccctggaccttggggaggtcttttgggaaactcttagcctttcctctttcagtagtagcacatcttttgaggactctgctcactacaaggcacattccaactccaagtttccatgcggatgttaactttaaaaaattatcccttggtatttgtgaacaagaaagaaagaagcaggggcatatagaagtgtgctagtaggagctgacatctggtagttgacaccaaagatctacaaattagtaggtgtctgctttgttgacttttctattcttaacttaatagtttatttaactgcatcccttagaggctgttaaacacagcaaagggaaatttgtaagcaaactttgggaggagaaacagaaatgttgagcaacagaaactaaaaggacacaaaagaggcagcccattagctaaattaacaaacaagttactgaagcagtgtcagctgagcctgagtccattagcctggtgtaacagatcatgcaataaatggaagaggcaaatcaaaaacacacagaggagatgaaaaataattttaaataacatatgccaaataacacagtaagactgaaaataactctatgtatagcgccgtcaccttagtagtagctttgcattaagcctatggggttgttggggagaaatttcaggtgtctgcgtgccattcttgcagggaataggacaaatactagaatgcagattctctatcaaaggtagcaacatttgacgttttaactaaagatttatcctttaagctgttgtttaattttgagtgctaattcctcaatggcccagggcccagatttgcttaattcagcccccgagggaactattacaaaaccagggtcacaaggctagtgaagtgtgcaatacgcaataatcaggcacacgtacaggtgtctgcactccacactcgcactgactcttggaaagaagaggggggcctgggagatccaggttggaaggatcttgtttcgctctcccattggcccccaacactggcctcatggcccccttactggctccaggcatccccctcacccccaccaacgagccagctgggcctgttcccctctccactcccctctactccctccctgtaacctccggtctcccgcagaaagaaagaaaaaaaaaaaagcttggattaagtgatgagctgcccgcctctaaaaggaccaggaggcgtatcaagcctgagtgccggaaaacccacggcaatcttcagcagccaccacgtggggcagagaacgcgagcagtacctgcaggacccacagccggtcgggctctggcgccagcctcgacggcggccccgccatctccgcccggctgcccgcggcctcacctcctccgggggctcggttagcctcctggcgctgcaaggctgcctgcgcgcggttcgctccgggggagggaggaggagggaggcggcgaggagccgacggctccacctgatggagaagcgcggagagtccctagacctcggagtgcgctgcaagaggggagaggagagagaccgccgcccctgctggaagccttcgcgtccgggggcggcgcgcgggggaaggggtctctggacagtcggtggaggcggcagccctacagagacagccgaaagccagcaacttggaaaaccgcccgaattctgggtttctgcacatccaggctggctccaggtctcttgtgcccaccgtgcaagccggcgggatgccagcaggtggcatcctctccagcgtttcttcgccaggcgtggagtccggaggccgaatccatcagtccccagccccctccccaagcctccggtgccaagtgctgggtcctgtgagcccctggcccgccccccacctccgccagcggggcgagccggagctgggtgacccagaccctcgcggaggcgggagcctacagaggatgccggccggccccaggttctgctgctggctggccaagaagtgacaggagggcaaggctcccccggaaagcgtccaagccctgctctcctgctcttccaagccttgctgcgtgttgcccccagggttttctgagatctgggacgaagagagtgatgtgcaaggttctgggtcccggtgcaggagtgaggggtacggctgtcgagtgctcggagcaggctggcgtttgggcacactgcagacctcagctcaccgccactttctcctgaccttcctcgtggctgtcagcccaatgtctatcatgtgttattccctcggtttgttcaaaggcctgttttggatacttaaagacatgtggaataactatgagaattcctgttcctggaaagtttgtcctctagttggaaagaggtatatacaggtctgtatgtgggaaaatattataaaacatctcactgacattttaataagagaaattgccctggatggcatctgtctgggctcttcctttccattagagatgcatccttctaggttagcttgcttggggccctgcaggaaagctgcaggatgaggcaacagtctagggcccccacctgggcccaggcaacagtctagggctcccacctgggcccagtgtccccactgtcctatccttctccatcttccccactgccatgctggccaggctcacagtcacagctattctgtgttcatgagacaccattatcaccaagaagagggagcggctcttttaagagatgggcagtcatcatgtacagagaattgcctgtttaatgcctcttcacagtatttgttgcagagatacattagaaaccgcattccctttttgtttttcatatatcctgccagtactggttaaacctcttttgtccagggatttaacacattttgaacagcctcctactgggagttcagggtaacctgactctccagtcgtaggtaagttaataaggactccaagctacgtacacttccagagaccagatggtcgtcagaggtcctcgctgggtggcagcctttatgacctgggcag

SEQ ID NO: 308 - DNA, 38630 bp, Homo sapiens
  source 1..38630: mol_type = genomic DNA
tgtgcccaggttccttccaacccctgacccagcatgtagaggaagaggctgctacctgtctaatatctacgctccctttacttggcgttggagtcctggagtttcctcggggcactttccagtcccgctcgcagtcaggcgtggatgtgactgagttctagctgttgggaaaatggagaagttatggtgcaacttctgggacatgcccttaaaacaggcttgcccatcactttctctcctcccctttccactggctggaatgcagatgggatggccggggctgcgaaggccagggtggaccaggaaaccgctgccttgcatggaagacggcagggcagggagagagggggtgggagttggagagagagggagagagggggagatagttggagccctgtgggccacagctggctcacactcaccctgtgactgtgtgacagggaacttcacctctgctgctgtctggactctagctggagccaactcctggctttggatgcccagagtgaagcgctcaggcctgtgtggaagtggtagcgttcacctgtggtccccaccactgctacaggagcagacagtgcgaggcagagtcccaggatgcccctcccagggctgcacctctgggcagggggagggacgaggccctctgtgctcttggctcttctacacgcaccatactcacctctgagacacacccgctcaagatcattccattttctaaggaatctggcgtcatgcccctacgccagcatcagaagcacttcttacactgtgaaggcgctatttggattttgtgggccagcacaccactgagcaccacggaagccactgctgagagccaccgtgctggggcacctccgggttcctgttcacagcagagccaccctgcacgcaggctgcgccacggcatgaccttctcgggctgcccgctgtctgaggggcgcctgaaggtgagatcacaaaacacagaacacgatgtttacccgtgagcatacgcttgagctcatgaggttcatggtgactatgaaaacgcacaaggagggcaggtagcccagggcccacggtgcaaccagtgggcgcaacggtgccgtgagctggcgctgcggccgtgaagctgcctcctggagccatttcgcccctctgaatggcgctcgggttattttcagacaaaggagcatcaactggaggttctgccttttcgaatggatggaattacattcccaacttctatttaccagagtttccaggagagaatcactctcaggaggggcagacaggatcaggactctccacggaatcaacttcatggcttctaaagcaacttcaggaggcacaggaatggggagacctctcatctgggtgggttcccccttcccagctcatgagaggggcagatgccagcaggcaggccttgagccttggctggtgggacaagaccaaagtcagccaccagcaatgtctccaagactgatcccagcacacaaggcaggcaaagaattttctcaactctttttattaagttagaaaactgataaaagcaacacaacttttggggaaagcaccatggcacgtcctttgtgctatgtgataagtgtgctttatctcaatgaagcaaccccacgggtccaggcaccctccctgcagtccccgcggccaggctcctgagtgtgccagcagagccgtcccctgggaccacagccaagtgccttcgggcagctggcctgacacaggcggggtctgctgggtctacagggtccaaggagccccatgcagccagtgccccatggcgggcgtgtcagtgggcaaaccctgcccaaaggtcccacccccaagaggcctccaggacccgcaccaaggcatgggggacactcgtggctgcttaagtaactggtatgtgcacagccccctccgcggccctaatcttgagccagccaagcagtgttcacactgcaggtgcctgggaagccccaagtttggacaccctgcccagtccctgtcagggcaccaacacccctccctctcaaatggtggcttgggagtgagcgagaggcattaggatggtcactgacaggcgccaacctctccatagcccaggtgtcagggaggtgctggtgagggaccccagtgactcaggaggtgacagcaatgaacaaatgttcagcagttctctcggggccattcttatcttggagctcagggagcaaatgggggccaaaacgcaagaggatggtgagggtcccgtcactgtcctccacactgagatggatgcggccctggtgggatctgcaggggacaccctggggtccctctgctgtctccagctcacagctgctcctggtcttggagggcagcgtggtctcctggggagaagcccccagtgctgttggcaggtgtgtgccatgggggtcactgctgcctctcagggtgggctctgaggaggggaggggaggggtgacccccagggcactcggagccttgagtctgctgcaggcccagctccactgagtggccacgagcaactgtgtccccaccgggccacagcactgagcaaggccctgagtaggtgggctgggacttacagctttgtggaaggggcccacaaaccttggaggtctgggtgtcctttgctaataaggcctcatggatgtcactgaggcccccctgcagtttctgcaccttaaaaaatctgtcttggtcacctttctggtctcaacccctgggaacctagtttcccaggcccaggacaccatctatagatggcagtagagccccagcagggcaggccaggagggaaaggatgtgtggcagtgccgcagccccaaagcccacccggggcgcctccctgcccctgcctgcccggccccagtccaggacctgccaaacaggtgatctcaaggctctgcaagtgtccttctccccgacgccagggtcagtcctggtggcagtccatgcccctctgggaggtatgtcttcccacaaaccactgcaaagctgaagaggcccccaggggcacggatgcaagagatgcttctcttctcttgcctaaagctcagaacagcccaaggctgctgctccccagagctggcagggccccttccacctctcggagtgctggcccagggccggcttagctcccgctgtggcagacaagcaaggccacgctgtgacactgaaggccgcggtctgtggagggaggagaggaagagaaaatcaatcagtggccacattgttctgttctgacctgatctggaacaaaatgacaatgacacagctgcccatgaggctcgggcgtgagaacgccagatccaccattcaccggcagcgcagtctggtgattcaggcaccccaggcctgctttccccactgagtggcaggtgactcaggtgtcaacttgattggattcggggatacccagacgcccggggacacattacgtattctcagtgctggaagggaaacccaggcggcttggtacttgattcgaatggccaggccgccccagtgagtctgtgcttccagaggtgaccggcgtgagagccgtggttgcaggtgagcaccatcagatgggcaggggccctggtggaataaaaagctaaggaaatggggactcaggtttctttcttctggagctaggttgctcttttcctgccatcgggcatcagagctccaggttctctggcctctgggacttgctgcccaccaccccacccccaccccaggctcttggctctttgtccttgggctgaggtctgtccccagctctcctggttctgcagcttgcagcctatcatgggacttctcagcctctatcaccaagtgagccaattcccctaatagagtaagttccctctcacataccactccgaggccctgaaaggaaaaggtgagccctctcgcacaggcgggcacaggcaggcggagcactctagcaaccctgagtgttcatgcactccataaggcaaggagcctcagcaaagcagtgattaatggtgacgctgtccgcggtttttggctttggttgtatttaagctgtacgtgttagttttagttgtgtaagaacaagaacataaggggctttctagttgtatgcttgtgtgtattaagtaaccttagttacatttcaattaaacactgaagccagcactgaggctccacggctgtcccctttaagtggggtacacctctccatcccacacagtgctgggccgtctgttctctgaaggctgctttgcaggaattctgccctccccacgtgctcaagttgtttccagatacagaggctgggttcggcgactgagaaggcccccaaatcccttcaagctcctcacaagtgagaagctggggtcacaggggccctaaccatcctgagatgctctaagactgcaaacccgaacctctggggcctggctgcccggtcttggccccatcccagcacgccacatgctgacatgtggtcccttcagggcaaggcctcactgctacctggaactaaacagccacgctacctacctgggggtgtcccccaaggcaccctgagttgctgaaaggaatacagatgacagctagaggcacaggggttggggagcctcggggccaggctcctgtgttccctctcaggctgggtccctttgttccctctcaggctgggtccctttaatttttggcaggtgctccctggggcctggcctcaactgtgaaatgggctaatcctccagcttgcagagtggacaagggtcagcggccgccctgcacttcctgtgtgcagcaggtcttggccaacgtgcatcctgtgggttgttggtgtagggcctgccccactaggctcagcctgccccatcaagggtgggatgctgctctatcccccagcctggcacaggaacgaatgactgctgatgcctggacggacggactccgtcctgggcacttgcttagccaggcccaaccctcaaggctggcagaaatcctcaggcctgtgctctgggatttcccatctgtagcaacttctttaagacaggagagaatgtactgtactgtccctcctgcagcagtgacggagcccacagtggattaatgagctcggcctttcccagagccaggactggaaccctgccctgcaccccagtggctaggccccagcaacaccctgaagagaagacaagctgtcggcagccggatgcctgccttgcattcggcagcccccccatgctggaggcgggtgggaaagaagggttgggagtctgcgccttaaagggcctggagtacggggtgcccagtgggagagaaagagagagaaggagagaatgttcacagcaagatcacccttagtgggtaagcgggggcctcctgcagccgctggctgctatcccctaggctgtggatccaaccgcaacactggagcaaggggctgccctggaggtcgctcaggttccagctcagcaattccccgccgcttctggacggctgctggccaagcctgtgctctgtgccaggggcgcagacgtgaggatgcccgtggccagctccccagaggcgcctgcaggcaggcggcacactcagggctcaagtcctgctccagccctgactcaccattcatgtgatgccaactgtctcacctctcagagtcctagtgggcgccctccaacagcaggacctacgacaaacagctctggagaatgacagggaactcgatgcagacgctcacacctatgaagagctccaacaggtggccagaacaggggaaaaaaaatgcttgtggacaaacaggggccatgatctggggtgcagaggccacagtgtgcaggggacctcctggtggcttctgaagctaacgtcagagtcttacaggatggatggaaaggggcctccagggacaggggcagttgggcccagctggaggcaggagactcagccatgctcgtggggactagcgagagctggacttctcaccagcatccttggcctgatccccactgctgcctgggagagtagcgtcagggagggaaacgtagggagcggggtggtcacagaagccatctcgggcccaggcactgccagacgacattctaggtggcagacgacgatgcgctggttggggctgcaggcagccaagctcagtgggaagtgccatggtcaccaggggcacccaccgcgggggaggtggcaggagtgctttgtttccacccttcctggccccggtctgcggctgcctgagttgggggctctcctctggctcagccctgacagctccgcagtggccgcctgagcagcgagagctctgcttgcagccactgtggctccatttcctggtgacccagggaaggccaggcatgcccgggcagcggcttctgggctgcaggcccttctatggagagcccagctcactccctgcctttgaagagaactcggacactgagctgtccaggcagaagctggacaggaggagctttgcagagcatgggaacaacccagggtcatagtgaggggacagaagccacgggattggggtggcctcaggctgaggaggggctgcgcggagggtctctggatggccaccaggcccatgagaaggaagcagctggaacgcaaggcagtggcagaagcttaagagcaacccggactcagcgcagcagccaaggaagcacacagcccagaacgccttggggacatggctctgggatgacagggtctggaagtagcttccccatcagatctgggactggctcagtcttgtgtgtccgcttcctcatccctaaatggagctgatgacagcaatcccattacagactgaggaggactccagtgggcacagggcaagtgcctgctgaggaacagcagtcatgggtggacaggcctttcagagggaggggctaagcagagacatctagaggcccttgcagcccacagcaccccaaaaccatcagcatcagcatctccctgtcctccatcgctaccccttttaagctgcttctgaaactggcaatcacttgatctctattctagtgctatgagtaatacaatttccactcccgttgtccagatggggaagctgagcctcaggggaatcaagtagccagtccagggtgaagcagccaaaaagtcacaaccaagacaccatgcatgctctccttccagggtccctgggatcagagcaattcctgggagagtacatggttcaccaggtccagttgacagggcagggccaggtgggagggagcctctgacctggagggtaggcagggggcagcctctggtctggaggctcagaccagagatggtctcagctgcctgaggccagcagcatgggccccctcacactgcccagcccggctggcctggggtgggaggggcctccatttcccacaggtgacattccccaggtttctaaatgacctagaggatagcaacagggaattaatgaggagatgccagtatcctcttggaatctcactcctcagggaatcaagaaatttggcaggtctgatttttctctaaagacagcagattaaaaaaaaagaagaccgggcacgaaggctcacacctgtaatcccagcactttggaaggccgaggcgggtggatcacctgaggtctggagtttgagaccagcctggccaacacggtgaaaccccatctctactacaaatacaaaaattagctgggcatggtggcagatgcctgtaatcccagctactcaggaggctgaggaaggagaatcgcttgaacccaggaggcagaggttgcagtgagcagagatcgcaccattacactccagcctgggggagaacgagactgtctcaaaaaaaaaaaaaagaagaagaagaagaagaagaaaacagaaaagctgtaaaagaaaaaagcaagccagatgcggtggcacacgtctgtaatcccagctactcaggaggctgaggaacgagaattccttgaacctgggaggtggaggttgcagtgagcagagatcgtaccctgcactctagcctgggtgacagagcgagactgtctcaaaaaaaaaaaaaagaaaaagaaaaaagaaaaataaaagaaaaaagaaaactggtgttcctattcaggctggcctctgtgagcccaaacaccctgtgttcaccaacttgatgcttatgcttgggccctccttgcctgccaccatgtccctttaagggactcgaaggcttggctggatctgagttagaggctgagccatcagcttccattgagaagcaatcccagctaagaatgactgccttcactgggtagagctttcagcatttgtatcagcagccgctggctcactgaggaaattaatgtttagctcgggccagctcctgaaagggttcctatgacctgaagctgagcccacacgtggggatcactgccaccacccagcgctgcaggatcgtgggaagcggctgggctccctccggcaggacagctcatcttccacagtctcgtcctgtgctggaggcagagtgcacccagggatcttatgcccctattgcaggggtgaggggcccaggacagcatgagccgggagaatggccaagggctagtggcacgcaccctggcctttcccaggccctaaacacagagggtgtgttgggcacaaagcccttctctggcatctaccccagtaccctgccaggctggccgggataccctctctcgtggcaggacctcatgccgatcctgcccctatttgctgcgggaagaccccgcccccagctcagcttctcaggagattaaaccagcaccagatgagacactcctcccgcccgttccttcccttcactgcagggtctgcagggcctggctcaaactgctcccagtgtctctgtcccaccatcacctcccacagagtgccttccgtgtcacctgttttcatagcgattccacacaatgacagtgtggcagcaacccacagacactcgctctgcaggaagccctgctccaaggccctcaaggatgacctcgcttaagctagacgcctgccggcttcgaggaaggacttctccccatcccttgcatgctggtgagcacacagctgcccccaggagaaacaggactcaaaccaaggctgtctgttcccaccatgcaggctttggtgtttacagttaacagttttttggaggactccaccatttagacatggatgtcatgcctggttggcgatcattttttttttttttttgagacggagtctcactgttgcccaggctggagtacagcggcatgatcttggctcactgcagcctctgtctcccaggttcaagtgatcctcctacctcagcctcccaagtagctgggattacaggtgtgcaccaccatgcctggctcattttttgtatttttagtagggatggggtttcacttgttagccaggatggtctcgatctcctgacctcatgatctgcccacctcggcctctcaaagtgctggggttacaggcatgagccactgtgcccggccaggactgactttcacattgcccaggctggtcttgaattgggctcaagccatctgcccacctcagccctcctaaagtgctgggattataggcatgagccaccatgcccgggcctggttggcaatcttcatacatatcatcactcatcagtgccaggagagtaacactgtcctgactccatggggagggggccattctcctggactctgccttagtacatgtctcttcccttggcttatcttaatctgtatctttcccctataataaactgtaactgtgagcataacagccttcagcgacttctataagtctttctggcaaaattgaccgagggtggtttgggaggccccctttgttgcacctggtgtcaaaagtaagagcaggcttgtgtggagactgcaccctcagactctgcaggttgacctatgctccacacagcactgtcaaaaggtccctgggtgattctgaagtataaccatgtttgggaaccaccatgttggtctaaccatggttactgtccccattttgcagactggttcaataatttgctccaggttaactgcaaatagaaggcagagccaggatttgactccagagcacaccagccacctgctgcccacccagacttccctggaagacacggtgaccttcacccagtgggaagaggtgggactgcattcccccatgacctttccggacccagagtggccgtgggctgccagggactcacctggctgggctcagcaggtgctcctcacgcgggcaggtgcttccaggtgctgacaaaggccgtggggataagtgagtagggcactgtggtgatgcagttccatgtatctgaagtggggtcatagcagtccagagtcttacacctctgggtcccaaagtagcccccgaccacatagagcttgttgccggaagccagggcatggcaggacatgcgcttggcagtcatgtccccaatccgcgtccactggttggtctcacagtcaaagcggtaggccgaggcggctgtgaattccgtgtcacctcccatgatgaagatctggctgcccaggacggcagcggctgtgtaccgccaaggctgggggcactcggccttgatcgtccacctgttctccgaggggtcatagcactggaccttggacaccatgtcccggtggatgctggttcctccgaaaacaaagagcttcagcttggcactcaccactgcggcattgctgacgccatcccgcaagggggccaccatcatccacttgttggccccagggtcgtatttctccacttgtttcagggagacagaaggcgaggccgggaagacccctgccagggatgtgtgtccccccaccacatagaggcagttctccagctcagctgagccatggccaaagcgggcaatcagcatgggcgccgccttggaccattcctcatgtacggtgtcgtacacccagacatccttggagaccccgttctcggagcccctgccccccgtcacatagaccttgcagccgatcgctgaggcgctgaactccttccgggggctgggcaggtcggccttggggatgatctccttggccttgtggtccacctggtagatcttgtcacacatgaaggtctggccccccaggatgagtagcgtgtggcccgccttgcgtggccgggcacaggggctggtgaccacgccatcattctgcaggatcctggtcttgcagcgcagggcctcatccatgataagcttggtgcgctcgtctgccatgaggagggcctcgctggagacggcctcctgcaggcagtcggacggcagcaaggccagacgcacgctgcggaggagctcgggcaagtggaccttccgtggctccaggtcgtgcttcacccactggaggatggcctcgaagaccacccgctcgtcctcggtctccagctcatcactcgagatgaggtccagcagtgtgtccttggacaggctgttgaagtcctcgctctgcctcaccgtctcaaagtgcaccaggcacatgcgccaggagaactcatacagccggcggcactggtgggcgtccgagagcagcatcatgcccaggcagttggaggggaaaaggttcttctccaggaactcggcggcagcatcccgcacatcgtggaactgcagcatgtcgcctgcctccagcagtgactcagcgttctcctcgttgatggcgatgcgtgaggagtaggcaaagtccagcagcagctccagcacctccgggtgcaggttgtcctggaagttgacagtgtcatcccggctctcccgaaggccatggctgaacatggcctcaaaatagcggctagaggcggccagcacggcacggtgacaggggaaggcacggtcgcccgcccagagtgtgacgtcggtgaacatgcagtgcttgcgaagcgtgttgaggtgggccagcacacagtccgggtgggaggccttgtggaagagggtgacgttcatggaccccgtgctgctccgcgacttgcgggtctcatggacactgaccgacatggtgcgtcagcttgtgggggaacaagcccacaggttagaggagcccctcctgcccatctgccctctcagggctcactcttcagcacaagcccccttgtcccctcccacccactctctgctcacctctgctaaaccaagcccctctcccgcaaccacgttgccaaggacaacacaggcaagagtggctgggtctcaccctgccctgcagaaactggttttgttctcagggtatgagccagctctgggacaaacatctctggcctgcagatgagccaccccctaggcaagctccagttgaggctgcctcccatggttaagagaacatgcaaacggtgttcctgactgaggctggtgtccgggcagtgctaagtaactggtgcctttgaccacattccactctcatgacagtcctctacagaagcttctcttgtaagtcccattttagagctagggaagccacagctcagagaggccaagaaactacccaaactgccacagccaggattctcacatgggctgtccggctctggagcctgatctctgttcaaggtgactaatccctgcagggtttgctgtggacgcccaagcagagcctcacgtacccacttccctgctcccagcaggctctgccctgggccgggctccaagcggtactggctagacatcccccttgccttggaacaagagccgccatcaaggcccaagtgctcagtggagacatgttctctgaatccaggtgtctccacagggctctttacctagctggggcaagtgatggcttggaggtggggccgccagtgactcaccctcgagaccaacgcagaggcccaagatgacagcaggacatgccgaaccctaacggaagtgatccagatttgcctcagcaaagcagagaaacacgaagccagagcttcccaggtcccccagctgacgccaggatcctgggccaacgcagcgcctcccctgcctcccttgcctgcccttctccaccaggcctggggacctggcgctcagagtgatggagtgatggccaagaaacaggttcactacttgctcaatctaggggaattctaaagcactgtcattaatgtccagtgaatggcatgacccgaggccccagttcagtactttgaactcaaggctcagccaacaggcggcaaaactcatatacctagagaaaacatggccaacacccttgaggccatctcgaagaccacagctacctgccccactgacctgtggaaggagactgtattcaccaagtctcccgatcaggaattcactgaccaccttgtcaagaccctcaccagagtctccatgcagaggacctacgctccagctgtggctacaacagggtttttatacaagaaaaataaagtgaattaagcctgaaaaaaaaaaaaaaaagaaagaaaagaaaacatggccaaaaagcaaactgcattccagtatcttgaccccctaaaagcctgtgctgctgtcttcctgctggtaatggggccaagaaaaacaaaaaaccctaaacaacaaagtttttcatttttaattttcaaaagtatgtaactctcctgccgcctcccactccaagtcaattttctacttaggtaataatctggtaaaggtaggaaacgatttcatgcttcagtgaaattgtaaatgagtgtccggctacatggctctctcttgctcactcctcctctggaaaagaggcagagaagccacaaactgacgagattagagctagcaaggtccctgcttttgggcttaggcagagagggcacagggccagactggccttgctgcttggacccccaagctccaggtagactgtacaccgaggacctgcctaagacactgctgtccaaacctgcagcccacagtccacagggctccgaggctatatgaggttagcccttctgggggttggggtgagagcactggacgcagatccaggctgtatcctggctccacctccatcctgtacctcactattattttcttgtaaagtgagatccccatcctactcaggcctccacaactcacttgttggcaactatttcctgagcacatcctcgaagctgggccctcagatgcagtggcacggagcctgagagactgcgctgaccgggtctgagggaagctttgccaacagcctggcccgtgactgatcggaattgcctaatctgaattccagaccctgcgacatttccccaaatcttgctgtgattgctaaactctcactccagtttcctcactccagaccacccccttggtgatcagacaatttcccaaatgtggctctgtcccctcctgccccaccccacagtgtcaggacattttaagaggcatttgttgcctctggtctgcagaccgtgctgggggaaacgtggagagccaaggaccaggaagaattctagttcgagccctgggactcctaagcccatgccctctccactgaggtcacgttcaagggccctgatgctgaggtttggcttcagttccattgtcaacacacttgtgcttccaaggacctccctgctctaggtccctaggcacctcatcgcacctgccccctgccccaccctggccctgccagaggggaggctggttctgagcttgggctgaacggcagcttgaatgcctgggcttggacactccaagtgtggggtgagcccctctgggattcttcttacagacagccccagctggaatcccagctcctcaccttagtaactacggccctggaaccaacacacctagaactaactccactctggggcactgtgttaactgggctgcctgcgagagtacccaggcagagactccctttggagggggttatgggcaggacaaagcaagactcaaaagaccgagaaagccaaaaagcagggcaaattgaaacagggcagccacaatggtccagagaaggaggcagagcagtgacctctccaagccaacagtgagcggcaacccagggtcccagagctgacagataccctgccaaagtcggcaccaagaatgcctgcctgctgatgcagatgctggcaactcatgtacacgcccaggcaggttcccaccccctagacagccgccagcctggggcacctctgtgccaagggcggaagcacctgcctagttgtttccccggtttgtcccatctccttctgggcagcgcctgcccctgagccaatcttccactgatggcagccactcactcaccgactcagcctgatcccaagtgaggcactggagccccactttacaggcaaggatgctgaggcccacacagcttctgggcatgttatttgtgtactgtctcccaaactgcacaggaggcccagaaaggcagggaccatgtgtggggctcactgatgtgacctcaacacccaggacagatcccggcacagaggtcacttgacttgatggcatggacctgtccatctcttcctatgcccatgatgaagccctgagacacagcacacgaaactcattcatatcaactccaccatgactgccagcccagccactgtcaagacccagaggagaggaaggccgaggcagtggtgaatgctgcccaggcggctgcgacacctgacatgtggtaaacgcgtgtcattttactcacaccagcacaatgccgcctcctcctcgcactcacaccctgactgttctctgggaaccacctgcctccaggcagctcagcgggtggcatcccggggtgggcactgggccccaggtgctgcacatcactgggccctggggatcaggtggggagtggacacgtgccaggcctggctgatgagctagtgtcatcctccgaactgctgtgatggggcctacacccaggacagaccagtgggactctatactaagatgttcactggaactttgaggaacgaagcaggccctttccctaggactgctgaccggactggaccagggctgggagtgggaaggggtgacagccgtgttgccacctacccaagatggaagcctgcgcagagggccaagtggagccctgtggtcctctggtccgcccccttttgctgaggcctgtcacttaaggactcacagggtcatcagtgccctgaattggtgaccaggggctgcttgtctcggtaaggggtcttagctatgtgtccctccaccccttccatctagcaaccagaagaatggttgtgtgtgattattttcagttgctcaagatatatgtgttcagtaccagtgacatacccagcctcatagcagggcctggggatgcaaaagcagcccaagccagaggctcccagcggcggggggtggggagcatgtgagagggcccaaaagcaggccccgggaagcctccctgtgcccatggctcacgtctttggagccataatcaatcagacactctcgctctgcacatatcacagaattgttctcatgacctaagcgtcgtcctgagctttgatggatttaaggcacatagcgtaactgcacaatgttgcaatgccacagatcagcaactcttcatcctgctacgaggggtggatccaccttggacatcgctgctccccaggcaatcctcacctacagactcagctaaaatgtaccgggtaacaatgtgcccagcatccttctccagcacatctttggaaagttaaatgcacaaagaaacaaactagccaaggggtgagactttctgaagaaaacttgccacactcacagaagattccagtgaccgaaagcgaaaggcctatcctgagagaaataggaacccggatgccatcaaagctgctttttccgtgccagtctcaggaaggcctgacttagtatggctacagcactaaccccttcccacccgcctccactaaccaagagttagcaaggctcaaaacgagggtgtcagctccatcattcttcactacaggatggggaaacgagagaggcacagcgctcagcctgcgtagtacccaggcatgaacagctcaaattatctctggagctcagggccaagccaatccgtatggccccctggtacaaaatgaaaacccctccccactcccgcagtgcgattctttttttcttttcttttttttttttttgagacggagtcttgctctgtctcccaggctggagtgcaatggcgcgatctcagctcactgcaacctccgactcccaggttcaagcaattctcctgcctcagcctcccgagtagctgggattacaggcgcccgccaccacacccggctaatttttgtatttttactagagacgaggtttcaccatgttggccaggctggtcttgaactcctgacctcaggtgatctgcccgtcttagcctcccaaagtgctgggattacaggcatgagccactgcgcccggccagggcgattattttaggtttgccagtgtacctgcagtgtaccagtctctgggttagcaggaaagcacctttggaaactcggaaaagccaaacctggcttttgggctttttgacagatgtggctctggacccaagcacaagacttagagaggaaaatgcagctgaaattcaggctgcatgaggttgggtgcccttatgcagtgaacaacctgcacagtgattcacggccaccctgcaggagctgacgctgacagaaacccaagacacggcccttcctggcaccaagtatgcactgggtgcatcggagtcaggattccaccaacaatgacttcatgaaaacacacagccgcaaggacctcagcatgtccctttgccaggagttccatcattcccgttttattgataaggaaacagactcaacgccacattcttggaacttgggcctgactgcagactttgagctgctaattcctcaggaaggcggaggtgttcagcaagcagtggcaggaaaggagatggaaagatgaactccttgctctcctgtcccctcctgagggctggcagcacaagccaggtaggatgcaccagccacccggcctgaggtcccctgcctgggttgcagaggctgtgggggcagcaaccatgtgtgagggcgcccagccaggctgctgcctttcaatggctcgtttaaaaaaaaaaaaaaaaaaaaaaaaagcggccaggcgtggtggctcacacctgcaatcccagcactttgggaggctgaggtgggcagatcacaaggtgtggagttcgagaccagcctggccaacatggtgaaaccccgtctctactaaaaatacaaaaaattacccgggcatgttggcgtgtgcctgtagtcccagctactcgggaggttatagcatgagaactgcttgaacccagcaaatggaggttgcagtgggccgagatcacgccactgcactccagcctgggcgacagagcgagactctgtctcaaaaaaaaaaaaaagaaagaaagaaagaaatgcaggcagggcacagtggttcacgcctgtaatcccagcattttgggaggctgaagcgggcagatcacctgaggtcaggagttggagaccagcctggccaatatggtgaaaccccatctctactaaaagtataaaaattagctgggcatggtggcacgcacctgtagtcccagctacttgggaggctgaggcaggagaactgctcaaacctgggaggtgaaggttgcagtgagccaagatcgtgccactgcactccagcctgggcgacagagaggctccgtctcaatcaatcaatcaatagcaaaaaaaacctttatgcatatttattcaatattgtatagatcttgttatttaaactgtaactgatctgaattatatttttcaatgtgcatatttatttagtttggttttgtttcatctttttattgtgaaaagatctgaggccgggcacggtggctcacgcctgtaataccagcactttgggaggctgaggtgggcggatcatgaggtcaggagatcgagaccatcctggctaacacagtgaaaccctgcctctactaaaaatacaaaaaattagctgggtgtggtggcgggtgcctatagtcccagctactcgggaggctgaggcaggagaatggcctgaactcaggaggcggaggttgcagtgagccgagatgccaccatcgcactccagcctgggggacacagcaagactccatctcaaaaaaaataaataaataaataaataaataacagatctgacacttgcagtgaagccacaagaattgtgaaatggcaccttctggtctcaggtggacagtttgctgggcagtacttaaacctcccagccctcagcctcaccccagcttccttgcctcactttggcccccatgcctcctgcacaggaatgggctgcccatggggcagttctagaatggagcaaggatcagggaagggctgagaatgtctgcttcagacaatgcttggtaataaacgggcttccccttcaggcaatcccatgaggtccctgcatcaaatagctcccagccaatgctcaccccaatagcacagaaccacagcccttccgcagcctctgacagtgcatacagtgagaccacctggcttcacctgctttcctgaggtcaagatcaacagtgccaccaaccaatgctctcaaattgtgtctccttccccacccagacacagacacagtgtcccttgtggacaatgaatcagaggattactctacacatggccctacccgtcagcctgcagccaaagcctggaaagcgaagggaggtcccgacagacccagagggccggccgatgtttcagtgccttctccacatgctccagccttttcacgtaacgcacccaaacattaagcacacttgaagggcagccactttaacttccaggattgaccgcagagtcccagggtgactgcagcctctggtcaccagggagtgggagctgtgattacaagttgagagggacgccttctccactccagaggaacgggtcaggcggtgcaccacgctgggccctacccagtttggtgaagctcttcttcacaaagaaggcacagaacaggaggtaaggggtcaaggcctgtgaaactctgctgaaagatgaagcaacacgtgctgctaaaaatcagcaggggattctggccaggaagggagccaaatcaaatgcacgactatcatgtacctgatactgtgctaggcattttacatacaaaatttaatcctcacaaccaagctcaacatggttatgactttctgtcttaatcaggacggatgaggttctgccgcagcaaggaacaacccccaaatcgcagcagctgtacaggagaaagattttatttcttgctcatactattaatacatgcatcatggttcaggcggtaatgagtgttctcatcaatcccactcctaggaacccagatgacagagctgccaccatgtcaccagtcactatgccaaagggcggagagagagctctggaaagcatagcactgacaattaaatgcttggcctggaaagacacacagcacttctattcacatctcactggccaaatccagctacacgccttcactcacccaccagagagccagaaagtccaatcctgccatatgccacactatttctgtaaaaaatttaccgataagaaaatagaagcttgcaggttaatgataatggcaacaacagtgctaatcacagttgcttagtatcatatgctgggcaccgtctcagcacttcacgtgttaactcacctcatccctactcagccttaggtataaccatcgtctgcatttcacagcttaggaaactgggcagggaggtgttaggcaatttgcccaaagctacgcaaggagtgggggcagagcccagggctctgtcttgctgagtctgttcccacaactacactatgtgagctcactgacccaagactggggaaggggcggcgttcaaatccaggccatccctctctttgctgagcaccaaaggggacagaagagaggtctgtggggcctcagccctgtgtccaccagcaggtcccagcaccaggacactgtcctctccgtctaccccttaagcagtccttctccaccagcttctgtgcaaccaggacagagggatcccgaagaggattaagctcccaggccccatggtacccacttctctcctatgggtcactggtcctagtagggagcagcctctgtgatcagatagggaatcaggactgagaaagttcaccttagagaaaggacctatccaggacttgcccagctactcaaaggcaacgtatggatttggccagctcctcaccaacaatttttttttttttttttttaaagagaagccatcttgctaagaagagaagccagccgaaccctcccatgggaggaactgttcaggccacacatccagcccggggcaggtgcagatagatgcagccatggatgggcagcacctgcctttctgcccagcgtcctgtctttttgagtgggagctctacagaccaagtgagagaggccaaaagccacacccaggagctccactgtgttgtcttttactgacattaacagtgaggagcaagacagaaaagacactaatgccctagaaccacactgcctgaccaaagtgagcagggaggaggcagtggatggggacacacagcttagttcttggggaatgaaaaactcttcttcatcgtatgtataaggcatagatacacatgtggtattaaaatgcaatgaggagggtgggtgcaattaggaaaaaacatctaaaatggcttaggggtagggaggtgccaacaagattgagaaacactgcaaacacaactactattttcactatggcttattattttcagcttttatcccaaaacaaacacttttaaattattgcagttacagaatactattttacactggttttacctcaacttttcacagagttgccattttcctattctgccctcactactgaacaaagactgattaaaggcctgccaagtgcaggcactggggacccagccttctggagccctcaggaaccttagtctagtgtctttgtggttgtcaactgtaaattgtaatgtctgtggaaacacatcactatggtttacaaatccattcacccataattttctgaatttttatgcaaggaaaaactaatgccttttgcttctgttggttcactgtattctcttgagataaatccttttgagaaaaaatgtttttatgtcataccgtcctaaaagttctatttaccaggtaggccacccgcaagccacacttaaaccaccctgcaacgaagaggcttctttcagctcaaggaggggtggcagcccctctaaactgtcaaggcagatggaaggtgccgcctggcttctacctgccacatgccaaccccctcaggttgggggtgctgcccaggctttctctggaccccagagctgggagtcatctgcaagcccagctgctgcaccagacgggagtaatgccaataaagtggactccactgctgtcaccacagaggggacaaagaactcagcactcaggttcacccatctggtgaagtaactcgtttccttccacttatccagagcaagccagagacagaaacaaagaggggcagcgagattggctccctccaaagcaaacgtggcctcctgaggaggattccccctctatggcaggactggcctggccctttgcaaacagatgcagtctgaggacctggagggaggctgtctctcttcctgtctggtcccacagatggagccattaaaagcactctggcctagatatcactttcaatgaaccaccaggagtgacagtcttggaggaacacaaacatgcagaacagaacaaaaaaagaacaaatgccaagcactggccacttactggtagtgaatttctttctccctgttctccagaagctctgttcttctctaggctgtcaacgctgatgctgaatcagaatgagaatgcctctcaattcccaaagcccaagacacaactctttctttacccgctgacagagatgagagcaaggggagcatagttggcacaatctcttcagacaacaattgggaaacatcttacaaaatgacaaatgcatgtgccctctgccccagcatttccactcctaaaaatttcccttccatcatgcctgcacatggttacaaaatggttacacaccgcagcatggttacaaaaggaggggctgcgaacaactacaatgttcacgaataagaggcctggtgagataaacctgggtacacgcacagagtggagttccacacagctatctaaaaaaaaccaaaggggccgggcgcagtggctcatgcttgtaatcctagtactactttgggaggccaaggtaggtggatcacctgaggtcaggagttccagaccagcctggccaacatggtggtggcgggcacctgtaatcccagctactcaggagcccgtatcccagcccgtatcaatgaacttttgtactcagtggcattcccatctgacagcctgtcctgcactttgaatggattgtttacccatgtgtgattctgtaacatcaggcatcggccatttggaaaacatcggttcactgagttatgcactctggagagaatgagtgaaaagggcaaataatgttttagtattaccacaaaaatagttttgaccttgtggactctccaccaagagaatctcagggacacccagaccacactttgagaacattgcggtagcggatttttctttttttgttttttgagacaaagtttcgttctttttgcccaggctggagtgcagcaatggtgtgatgtcggctcactgcaacctccacctcctgggttcaagcaattctcctgcctcagcctcccaagtagctgggattataggtacatgccaccatgccggctaattttttctatttttagtagagacggggtttcaccatgttggccaggctggtcctgaactcctaatctccagtaatccacctgcctcggcctcccaaagtgttgggattacagatgtgagccaccgcgcctggccagaagatttttcttatcttccacactaaccactgttttttttaagaactaagaaaaagaaaattctgtaggaagcatgggggcctatgcagggggtctccatcccgtttgtactgtgatgcactagagcctgctgtcaccggaggcagctggacccagtaccctctcacccactgctggctgcctccctctaatgacctggccctgcctgctcctcccttcattatcaaaagccttctctcacccacaggaccacctcatccttctccaaaaaaaaaaagaccttgggtttgcagaggacaggccctccagtagcaaagtacaggggccgtgagtagactgctacacttgggctttgcagttgataattctcggtctcttgaaattacatatgtacgtttatttatagcaaaaacatgggtgcccataaatagccagtcattcatatacacatttttagcatatggtttagccaccaagttccactgcatcatccttcctgggaccttgcattggggttttccttcccagtcttgcgtcaccactgcaggccaggttatggtcaggcccctgaaccctttcttcccacacctaccaacccagtgccaaattgtgagcgctcctgctcaaaagccttcaaggaggctttcacatccaagctgtgttcaatcggttccctttccagctttgtcccacccccagcccctcttcctccctctctcggctttagctctccccctcccttcctctcattctccctgctcagccccacaccctcacctccccaatctctcctttcatagctacaccccactctggattttacatttgtcgggtatgtggatggccttgtccacagtacatgctcagaaaatgaatgcagtaagtacactgaaatctgagcacctacaatgtggtgccccatgcgacacacagggcatatggcatgcagtaaataacataattttgtcttgtctcctagaatgaacgttcttctgccctctgtgcctttgctgcagcacggtagcctttcttctactgctggacagcactgttcactcctcaggtcactgcgtattgtgcccttctctgtactggcagctcaaggacattgttctgtgtcatctttgctacctagaatcgattagatgcttaataaatactgctgaatgaaatggggattagccacaatacccacgggagaaagaatcaaaatgatccagagatctgttagacccacctgagagttccctggtgcctgcctggtacctgccgtattatatgcaatataatcaacatataccatatttaaacattttatttattatttattttgagacatagtctcactctatcgcccaagctggagtgcagcaatgcgacctcggctcactgcaatcctccagctcctgggttcaagctattctcctgcttcagcctcccaagtagctgggattaccacggctggctaatttttgtatttttttttttggtagagatgaggttttgccatgttggccaggctggtctcgaactcctgacctcaggtgatccacctgccttggcctcccaaagtgctgggattacaggcatgagccactgtgcccagccatatttaaacatcttaggccaggagtgatggttcatgcctataatcacagcactttgggaggctgaggtgggcggatcacctgaggtcaggaattcaagactagcctggtcaacatggtgaaaccccctctctactaaaaatagaaaaattagacaggcttggtggcaggcatctgtaatcccagctactcaggaggctgagacaggactatcgcttgaacccaggaggtgcagcttgcagtgagctgagatcgcaccactgcactccagcctgggtgacagagcaagactccacctcaataaaaaaaaaaaaaaaaaagaattttaaatgctagatgggaaaaagcaaaccttaactcttttctggatggtgttccataaatcatacaaagcgaattgcagataccgaccttgggcagcctaccaggaaggttagatgctaagagtccctggtttcaaatcccagcactgccattgctacctgtaaaactggtccaagatactgaaattctctgagactcagttttctcatctgaaaaacaggggtgacaataactgtcctgacctcgaggtaccatcctcagaattaagagagaatacacgtaaagagtgtagcatggtgggacacaaattttgcttgattcatgacagctgctgttattaatcatattgttattgatgcaggtccatggatgtcgacctgattcctgtgatcatgacagagattttcaaatctaattaatgtgtgctacataggtaattaatggtgttactgatcaattggttgaccttaaagaagggagattatctgggtgagcctgatctagtcaataagccccttaaaagcagagttggctgggcacggtggctcatgcctgtaatccctgcactttgggaggccaaggcaggcggatcaccggaggtcaggagttcgagaccagcctggccaacatgatgaaaccccggtatctactaaaaatataaaaaattagccaggcttggtggcacacacctgtaatcccagctactcaggaggctgaggcagaagaattgcttgaacctgggaggcagaggttgcagtgagctgacgttgctctactgcactcagcccaggcaacaacagcgaaactccatctcaaaaaaaataaaaaaataaaaaaaaaagcagagttttctccagctggtcccaaaagtaaaagagtcggagattcaaagcaagaaaggatgtgacacatcactgcaggtttgaagatggagggcattgagactagaacccggctgcagccagcaaggaaatggggactgacctcagtcctacgaccataaggaactcgattctgccaaaaacctgagcctggaagcagattcttcaccagagcctcaagagcccagtacagctgcaccttgattttggacttgtgagaccctaagtagagaacccagtcaggccagcccagacttccagcctacagaactgtgcattaatcaataggaactgattaagccactaagcctgtgatgatgtgttatgctgtaacagaaaccaatataagccccacctggcctctagtcataatgtatagacattaaaaacacaccaggtaattatccaaaaggagcagaagacaactcacgctttctgcattttcaattcctggacatgtgatgctagagagcagagactgatgtatttcttttttctttttttttttttttctgagacagtgtctctctctgtcacccaggttggagtgcagtggtgtgatctcggctcactgccagctccgcctcccgggttcacaccattctcctgcctcagcctcctgagtagctggaactacaggcgcccaccacgacgtccggctaatgttttgtatttttagtagagacgaggtttcacaatgttagccaggatggtctcgatctcctgacctcgtgatctgcctgcctcagcctcccaaagtgctgggattacaggcatgagccaccacgcccggccaactgatgtattcctatatcctggtccttagcagagtgggtagtatagagcaggttctcaatttcatttaacaaagtttcaaccttctgggcagtcagaactacattgcttacagctttggagctgccctggcagccaggtacaattatctgagcaaaacccagcaaagtcctttttttttttttccacctagaggaaactccaggcacaggaagtggttcagacaaagccacccagcaaccagggtaggtgtgtgtccacatgcaaacgtgtcttgctttgtacaacacagcaaaggaccatgtgcagtggcccctgcctcagcccgcagcagcctcccacggcttagctaaccagccaaaccctggcattttgcttgtaattgtacctcccagtaaaaagtcctggttggagtggtaaaaatagcaactgcaacttcctgcaacacagatataccagttgatgcctgaaaagaaacctggtgattcgacctcactccaactcagcgaaatgccttcaagctgcgctcacaatggcagtgggacaggagcccagcaaaggcagccgacccacccccccgccccaggaggacccatgcaaaaccagctctagagtgagatgcttcccttactctcttaatgaaacacccaactctcagaatcaggaggtgtctaataaacgcaaaaactgctttcagcgaggcccctcccctttcccttctcctgctcactagctgcagaggtataaaggcagaagccctccctaccaaagccctttgagggtcccattgtccccttggttaccctctcccttccccctacctacatctgtccctgagattgttccaagtaggtcaggctggctgggatcacaggagcctcctctgaagcttggttctgagtcatctccagggcagcaggggagtcatggccaaacctggatgttgcttcctgaagggtggggagagcctggccaaaacgtccccaggtacccagcagtaatgaattcctctggggcccaggccatggtcagcagttccctggctcctctatcatggggcccgatgcctcctgggaccacacaggcaagtaaacagggtttagtctgtggtggccactgcccctttctgggcctttctctggaccagctacggaactctctctgtcctcctggctcatttctttattcctgcagacaggtgacagatcattgactaagccagccctctgagaagagctctcaagcccagccagatggctctcagccaggtaaggccccgtgcatctctgggacaataggcagacacctcccacctaaggccagctccactgcacaagggcaaagtcaccccagctcctcccctggatatgctggctgtttagaaacacctgaattcactcaaatgttccagatatttccatttcgctagtaaaaaccatgcctcttcatgtttgcagagcttttcagcataaaatgaactttcaggaatgttttcccatgcaaaaaatacagcagcctagtggggggcaggggcgggcagggattaaagggcttcatttcacagatgagtacccagctgaggtcaggagaccaataagaggcagaaccagcactcaataaactttgatcttctggaaagacaaaagtggactagaatcaaaggacaaagcctgaataaacattttttttaatggaacaatgagattccacccgcccccccaccccatcacattagctaaaactaaaaatgtggataacatcaaaaatttgggggctgggcgcagtggctcacgcctgtaatcccagaactttgggaggccgaggcaggtggatcacctgaggtcaggagtttgagaccagcctggccaacatggagaaacccagtctctactaaaaatacaaaattagctgggcgtggtggcgcttgcctgtaatcccagctacttgggaggctgaggcaggagaatcgcttgaacctgggaggcagaggttgctgtaacctgagatcatgccattgcactccagcctgggtgacaagagcgaaactcagtctcaaaaaaaaattaggtgagtctgtagagaaatgggcattcaggcactattattagtgaaagagtaaactgggtaaatctttgcaaagggcatttggctttgacaatgaaaatttaaaataatcacacttgctcagaaagatgcatgatgaaggacacacaagatttcattgatcatacagggaaaatgaggcattacctaaagtctctccttaggacacaatgagaggaaatgatggtttggctgcagtgtggaatatgacgacgctgtgaaaaagagctccaccacacactaagtggtataagttgtagagtattgagtatgattcaaattatgtaaacacaaaatctgcacatacaacggaggactagaagggtatgcacccatctgtggacagatacaaaggaggggatggaccctcacactgtgctccatcttttcctatatttttcatttataaaggaaatcctagctgggcgtggtggcttgcgcctgtaatcccagctacttgggaggctgaggcaggagaattgcttgaacccgggaagcggaggtgagctgagatcgcgccaccgcactgcggcctgggcaatgagagggaaactagatctcaaaaaaaaaaaaaaaaaaaaaaggaaatccattgatatattatttaaatcagagaaaaacaataaaatgaaagagaacaatgttatcctcagtctctccctgcaccagaagactgcagaatgtcagggtctggcacctctctgtgcctcatgatgtctctgtccgcagcccacgcaggcccagcctttgcacgagctgtgctacccacctggcaggcctttctctgatcctcccacggctggctcaaatgtcaccaccccagagaggccttccttgacccctcttcggagggcatcctcacttgaccatcttcccacacctccctgtccacttcctctgcagctgcatatttttgtcagtctgttgtctgcctccctcagctgaatgtgggatcaggagagggtcggggaggaccttgccttgttctccactgaatcccagagcccggcagagaacagatgggggaaaaaaattccctggacacatttgaaatgaggaaaccaacagtccacttcctcacctcatcaatgaggaaactgaggcagattctcaacatgcccactattgagaccctagcgctgtgccatacccgcctgtctgcctcccacatcagacgctgagctcccaagcaggagctctttgaacctgactttctttcctcagcttctagtccacggcgagccattcagaaaactaaataaatgtttgttgcatgaacaaagctgggtacctttctccctcagatttccaagcctgtgaacaacaaaagcgttcacaggttaagggacttgctgccaaggtctcacaagcccagctggctagggtgcagaacatgaactccggacaatggatggaatcgccatggttttctagaaaaagagctcctccatctcttggccctcactcctctcagacaaattggcctggccaacagcaaacctggctggcagcttgtcctggagtttgaatgagcacagcttctccttatcttaattaggaaattaattctgctcagcctagatggatctgtggtcagcctctccttgggggcccaatgggaacaggcaaaaaatgtaagcaaggcttttttgtctccatcctttccctgcatcctactcctcaccactcggctgatggtggaaggctcctcctggcagagatgggtggggagtgacacctaaggtgaatgtggcccttgagctggtggcagcaggcacagcgctcccatggcctgctcagccctgcttccccgtgggaggagccatccaactggtcttgcaggctggtgctcagtcgcctcctcctgccctgctgggctcccttgagatccctttttttttttttgacagaattttactctgttgcccaggctgcagtgccatggcgcgatctcggcttactgcaacttctgcctccggggttcaagcgattctcctgtctcagcctcccaagtagctggaattataggcgcctgccaccatgtccagctaatctgctgaagatctcccttgctcctcaaagctcgttgtccaactctctgctgggaggtggccctggctctgtgcccaagggacatcccaccagggaagtctcaccctagtcattccagagggggtcatcctggtgctcccacgaactgctgcccagctccctgcccacgaccagtcagagcgatggccctgagaaatgagtaacccacacaccaccttcccttgagcccacgcctgctcccctaagcccagcctggtgctcccctgatgcagtcttctgtctccaccagccccttcgcaggaggcctcaaactctgaggcagtgggcagggacagggaactgccagaggctcaaggagaacagccccgtccctttggagttactgggaaaatctgaatcgagtcttcaggaaactaggagcttgcctacgtcacccctctcactctacaggtgaaaaaactagatcccagagaaagtaacttgcccaattcccacagcacacatccaaggcagagctggaactagaaccccattcctgacttcttttgttgttgttgttgagacggagtttcgctcttgtcacccaggctggagtgcaatggtgcaatctcggctcgctgcaacctccgcctcccagttcaagtgattctcctgcctcagcctcccaagtagctgggattacaggcatgagccaccacacccagctaatttcgtatttttagtaaacaagcggtttctccatgttggtcaggctggtctcaaactcccgacctcaggtgatccgcccacctcggcctcccaaagcactgggattacaggggtgagccacctcgcccggtccattcctgacttctaaattggcccctctgtactctactggctgttcaagctcttcctgaccagaaaggctaagcaagtaactcgagccttataaaactgctgaacaccagagcttgcaagaacttttgaaattttatagcaaaacatttaatagaagtattatacaggagagcaaattgaggctcacaggggtaagggaacctgcatgtagtcacacaggcaagctggggccaagcacgactcccctactctgactcaagtgctctttctgccaacaggttccaggtctgagggctctagctatgggatggtgaagagacggagttggcctcgggccttggtcacgctgaaacaagaagtggcccaggtgagcctcatacagactctgtacccaactcagggaacaggagaccactgtgggagaaaagtatgaccaggaagatttttatgtatttgcagaaaatatggtgcaatttctcaatgaaattgatttctgagaccacagagctgccatttaaaaaaaaaaaaaaaaggccaggtgcggtggctcacacctgtaatcccagcactttgggatgccaaggcaggtggatcacgaggtcaggagttcaagaccagcctggccaacatggtgaaaccctgtctctactaaaaatacaaaaagccgagcatggtggcgggtgcctgtaatcccagctactggggaagctgaggcagacaactggttgacttgagaggtggagattgcagtgagctgagatcacaccactgcactccagcctgggctacaaggtaagactcagtctcaaaaaaaaaaaaagaaaaatgccaggcacagtggctcatgcctgtaatcccagcactttaggaggctgaggcgggtggatcacctgagatcaggagttcaagaccagcctggacaacatggagaaaccccgtctctacaaaaatacaaaaattagccaggcatggtggtgtgtgcctgtaatcccagctactcaggaggctgaggcgggagaatcacttgaatccaggaggcagaagttgcagtgaaccaagatggcgccattgcactccagcctgggcgacagagcgagactccttctcaaaagaaaaaaaggttaataagccacacacatctatcgtttatcatccaacagggtgctgggacagggcttggaaggaaagcaggaaaggtttagcagtaagaaagagtggcaagagaggtagggggcgggggtgaggtgactggggactcaggggagggctgcaagtcagctgcagagcaacaagcacccaacctcaattctgcacccagggaacaaaaacaaaaaagggaaaggggagcccggcatgactgacacccacttggtgccagaccccattctaggggattctgcatagtatggtggttaaccttcaccatacccctgaaaaaagctaacaaagctcaatgaggttaaggaacttgatcacagacccacagcatttgaaccccagtctggtgccaaagcccatgctctttccactgctcctgggttaaaaggacttaacagggagcccttcctatccccaaaccccttcgcttccccacctaatcccacagcaccccttccccagtttctaacagccccagaaggacctggaggcagtatgggatgattatgccttgaagatgacaggtgtcagcttttgacagctttaggttggtatggcaatgaggtggtcaaggaaaggggttggaacctactgtaggggctgggctgacttccatcagctggggatagctgctgattgataagtcctgttgggatgctgtgactgaaagctgtggatgcttaagttctccctcctccctcctcccctgcacctccctcctctacccccagcttgttccaactaagtgtttcctggtgaggaaaatgcttcaacagccttggctggctgaggcaattaaattatgaaatttaccacattagatgaaaaccagcatctcaatcaaccaattcatttgtgtctggccactctgttttcttgtgccagctctgcccacactggccaggctatgcctacactgcctggtggtacagagggactaggggctcagacaatgggctggtctttgggaccagggggtaggttctcccaggacccccagagaagagaggctgcatccagaagccatccagcttcctacaaatgcgctggactgctgactgtgcggccagacactacggacgagagcaaaccttctaccacctcccacttgcattctccatggcctcaacctgtgcctatcttgaggctggcaatgaattgggcctctgggagaagtgtgggtgagcgacaggacaaaggtggctgccctacacctcgaatctgggcgatgacatgcctttctcatcttagtcaaggcatcctctccccaggaagccttgcccacctgtgtctccttctctcctcttgctgcctctatcactacgatgtgtcagggcccctaatccatgtgccagcactccctcatctaggtgctcactaaaggaagagtctccagcacctaactcagggcctggcacacagcaggtgcccaatcaagtctgttcaaacaatgaatcaatcaatcaatcagtcacaaaccacccactaaataacactctcactcatcctacccttccccccgcccccgcccaagtgatagacgggacgaaccaagcttgctttcactgggtaattgttctcttttcttcctgctctcttctgcccacacggggtgcccgcagatttaaaacgctattaaggggcatcgggctgcagaacctgcttccgatgtggagcatgcaatttgcctatagctcttctctccgcaccacatacataaatccaactgcagcccaagaccccaggatgaaggtgtcttccatttctacctcccttttatcaaccaccctggagtcactgcctgacaaatgactcaaaactgaaatagctgccaggccggaaaaagactgactacgtcaaccttcacaggcacagcttgtggacccaagagcctccggtcttgggacaccaaatggaccctgaggtggggtagactttgtgtcctactcttccccagacccccacgcaagccttcaccaacatgccaggaatcctcacagctcagatcagcacactgagcatcagttcctcctatgaatggggagactgggacccagggtcccagagggcttggccccataacggtcactggaatctggtccaggatacagaccgtggaatcctgcctcctctcctggtgctactgctaacttccttcccttcctctctctattgggccgatagagtggaaccaaatggtccagacacctggcattctctgccctgactaccgaggagagtcaaagtccagcccgccttccccaaggtcaaattcaccgggatccagcaggacccaagagcgtccagattaaatctgcaggggcctgggtccgccccctcacccacagttcgttgggtcaggcctctagagagatgtttctttgttcaaagacaatgggaatgcactttgggggcttagagcagcaacacaaaaaaagtatctggtatctcccgggcacaatcccccaagagaaaagcttctaaagcaactacgaaagagacagggggagtgggggcgtaacatcgcgcggtgtgtctcggagccagggcaagtgtggtaattagagtcaggctagagggcttgctctggacctgccagtctggccgccacccaggtggacaggtgggtgtgcctttgagtgcgacctttctctgccgctggacagttctgcaaaccgaaacgagggaccctggcaggcggaacgtgaacggctcggggctccgcggccaggcccgcgcaaaccctccccttgtgaaccccgggccctcgctctgcgccaggcaggcagccatccggcctgggcgtccaaggcgcggggcatcgccgctcgcgtcctcaaagacaagcagtctctctttccaggatcaatagtaattttttaaaaaaaagagtctgcggactcaatgaatcaaccactccctggggaaagagtagcggctcccgcgcgcaacatccatttgccaaacaattcattccctcgcgcagagctctcggcgaattccctcgcggagccgcggggtgccggccggccgccgctccccaccattgtcccagggccccggccccagccgcggggccccctcccgggacacgtagtcccgcgggggctccgagcgcttggtcccggcccggcccggggtggtgagtccccagcgcagggagcgggggcgcgggtgctgcggccagagcacggcgtccccgcccggcctggatactcactgccggagacgatccccgccgccgccgccgcctcagagaccactcccggcagcccgcgcgagctcaacaggctccgccgcggctcccgtcggccggctctccacaggcaaaaacgctctcgctgcgatacagcctaggcgccgccaacaaactagtttctccggccttcccgccccgcctcccggcccgaagagcagcagccaatcagaggcatcgcctctgtgacggatgggcagccgaacccttcagtgcagccgcagaaaagaagggggtgggccccaggccgcgccggcaccggggggtggggggccgggggcggggagggggggggaccgggggcggggcggggcgaggaaaaggacttcgaccagattcttaaagagacaggcgcctgcccaaccccgccgcccaagtttgggaacaaaacgcgacggtgttctagagctttccagagggagcactgtagattgcatatgcctcttttgtgttcgggtcacaagtgttgtagatctctttagactcttcagagccacactagtagttgcccgagtgttaatgaaaccctgtctttcactctgggcttgtttgaatgtttgggactttctgcagcctccaaaccccacctgtacttgaaatctgtattttttggagtatttcagctctcctctctgtgtcatttctcactaaactcctttcgtaagccagcctttaaatgttcgttcattcattcattcatccatccatccaataatttcttccaggaacgtttcctggacgcccacaccatgcactcatcttggagggggagaacggtttgtgattcttcgtccttttccctcctgactactacttcagcttactgtgtgtgtccaatctcatccgtaaagcggcagataaaaactcctcatcggattatttgggggattaaaggagacaaattcccagacaaatgagtgcgcaataaatgtcctctcttttctccctcccaatgaaaatcgataattcaagtaggttgcttaaggatacaaaaggtaaagcatagaaagtgataagaacgaaagagccaagcctggggcggggaaattcccaggaagcagaggtcaccctgacggaggtggaggtgggaggtgcaaggaaggtctaagaaagtgtacaaagatttgggagaggggataggattgtgactagtggaacctgggaaatagagcccctgggtagaaagctgcttagacaggacagatatgccagggttaaaagactgggagatgatgagaagataccaccagggaaggcatttttgggaaacagcttgatgttctgggtttgaagccccgccctgcccctcaagagctgggtaggactgaagcagatggctcagactctctggtgtctggttcttactggtgaagaggattctaaaacctttcttgcaggggtatgggaaagattaagataacatatggaataggcctggcatgtagtaagtgctcagtacagatttgtgcttccatttggcccagatctgcagacatctaaggcaccagggttctgatatttatgaacaatattggccagaggtaagaagcttgccaagtgcactgttaaggtgccttctgaagagaaaaggtagtgagaggtgaagccagctggactttctgggtccagtggggacttggagaacttttctgtctta

SEQ ID NO: 309 - DNA, 36464 bp, Homo sapiens
  source 1..36464: mol_type = genomic DNA
aaatgagctccaagctacagaggggatcctgggagcctggagcttaccagagatggggggtgaggggtgcccccaaaaggtctagatgcttcatagacgcctatagatgcaggactttgagccctggctgagggtcagtgtgttgggagggctggtgcttggggatctgagggtgttgggtccggtggaatggactttgggagtgtaaggtttgaaggatctgtgggcagggatttgggggagtgggagatgagttttgagtagagaatgggagataattggatgtgcagggttttagagtatgagaaaccagaattggtgtatgaagcaggtggtgggaacctaaggccagatgattggggtctcagggtggaggctctgaagagggtatgtcaggggagggtggggaaccatgaggggctggaagtctgaggcctgggcatgggtgagtttcgcccctgagagaggcctgggaaggaggtaagactggagtcggggtgtgcagggtggggagagggagggtgtggttctcagagcttagagacccatttctccatgctccatctcaccctccctcccaccctacctataactcacttccctgtggctccaacgcctcaaagtataaccacgcccagccaacgcccggggcacgcctgccagcgccccagggcactcacagacactccttaacacctgcacgtgccccgcccctcctcagatccgccgctcacttagcccggccccacccccatcagatgaggctccgcccccccggccccgccaatccctcgccccctccacgcacacacccctgatcttccccgccctccttccaaccagactccacccctcgcccaggccccgcccttcctcagaccaggccctctcttcgcttgaccacatccatccccagattcctcctctctcctgcccagacccgcccaacctcagacccatcttctcctttctacctccccgaccactcccccaccgcattcctaacctccaccttgtcccttctcacacctggccccgccctttatcctgcgccccgcctcctccgcaggccggacccttgtccctcctcctcttgccctgggcctgccccttcttcagaccccgccccactcctcagcccagggaccaaccccatcctgcgcctacttgtcctgcttcgccccgtccccacctatccacagacaatacgccctctcagcccagaaccgcttccctttcagacttggttccgcccctcacgccagggtcccgccccaatccggcacccctagcccaggccccgccctggacccacctctctgcatagcaggcccctccctttatcccagacccgccccggccctccgtagaccacgcccctccgattccgggcccgccccaatccttggtttctggtcccggccccgcccctccgcagacctggccccgccccgccccccgcgtctcggtttcccgggcctgcgcgcgcggctcccgtcactcgaacgcgcgacggcggggggaagatggcggagtccggcggtagcagcggtggtgctggtggcggcggcgctttcggcgcgggcccgggccccgagcgcccgaacaggtgagacccggcccgcaggatagacctgcacctgtcttggagcccaggaaacctgtgggcagtcttgggcgtcctgaggggttgaggggaggcctggcacggctcgagggtctttcgctgagaatttggactttacggggccgtggggtactggaggagccgagggctactgagggggtggctggaggggggctgggtgccccaggacctcgaggcgtctgcaggcggccctagggacctgagaatcctgggggtctgaagggaaaccgaggggctcttgactgtggtgggccgtggggcaactggggatgccaaagggcctgggcagcagagagggcctgagcaggggccatgccatggccagtctgagggtggtgaggtgtcttgggggctctgaggaaggggctaaggcccaaggcatcctgggaggtgctgaagggccccaaggtggctaaaggtggtcctgagagcgtgctgaggggcgctggaaggagtagagactgtgggaggctctgggtgggggacttaggtgaatctgggagtctgagatggggaggctgagggggcctggggtgggtctagggaacctgaggggggtgagagaactccagggggtttataaagaacatacagagggttcttctttggggctcctcccttccatccccatggggtccaaatccacatccccaacaggctaaaggacttacagaaaggtcttgccctcagacaaggggacagaattcacccctttggtcagagggaggccccctttccccatggcccagtcctgacatggattgcttgaacgtccaggtttgcatgacaattagttatcatcaataactaatgatatgtgtgtgcatgcattgtattggattgtcagagggaaagaacacctgccttaggagtgtgatctcctgctcttttcctattgggcaaagccagaccctcccaccccagctcctcctctagcccagcacccaggtcaggccaaggaggaaattcaggctttttcttgctggtgagcttccaggagccagtaatttcaggcaacatgataaatgatgaagttgtttgatacttacgtgctgtggagttttggacctgtgggctgattgttggagggaatggcctgatggcctggctgtgtgatttggtactgaatggaacacgcatgggatgggtggggaagggaggagggatggctgggccagggcacagaggaggcaaaggccctgcctgttcctgaggatgctgagtggcaccttgagacttaggtctgtgggcattgaatctggtctgccagaggggccatggggaacccaggaggtgtgtgtccagaggggtgaccagcctcctggggtaggtgtggggcaagattgtcctgcagtagggagccaggagatgtcagaggattttcagagatattcagggagtggccagggcttgaaaattgggtatcagttggcaagtaagggacagggaagagggacagtgaaccccaggtccctgccttgggcactggagtgggataacctggggctagggctttttttatttttatttttttgaaaccccgtctcgctctgtcacccaggtatctaggctggagtgcagtgacgccaccaaggctcaccgcagcctcaaactcctggactcaagtgatcctcccacctcagcctcctgagtagctgggactacaggtgtgcaccaccacacttggctaatttttaaattttttgtaaagaccaggtcttgctctgttgccaggctggtctcaaactcttgggctcaagcaatcttcttgcctcacccctcactaagtgctgagattacagatgtgagccaccatgctgggcatggctctttttttataaacagctttatcaagatataattaattgcatggcatacaattcactcattttgtttttatttatttatttattttttgagacagaatcttgctctgtcacccaggctggagtgcagtggcgcaatctcggctcactgcaacctctgccttccaggttcaagggattttcctgcctcagcctcctgagtagctgggactacaggtgcccgccaccatgcctggctaatttttgtattttttaagtagagacagggtttcactgttggccaggcaggtctggcattcctgagctcaggtgatccacccgcctcggcctcccaaagtgctgggattacaggcgtgaactactgcacccagccaattcactcattttaatttatcattaagttttttttttttttttttttttttttgagatagagttactctgttgcccaggctggagtgcagtagtgtgatctcggctcactgcaacctttgcctcctgggttcaagcaattctcctgcctcagcctcccgagtagctgagaccacaggtgcatgctaccatgcccagctaatttttgtatttttagtagagacggggttttgccatgttggccagggtgatcttgaactgctgacctcaagtgatctgcccgcttcagcctcccaaagtgctgggattacaggtgtgaaccactgtgctcaacccaggtcattaagtttcagtacatttactgagttgtgcatccttcaccacaatccagttttttggaatgcttccatcaccccaaagagttcccccaagctcgtctgcaattaaccctgctccaccaacatacagccccggggacatcctgatctgctttcactctctgtagctttgccttttctagaaatttcgtaagaatggaatcagacatgtggcctttacgtctggtttctttccttaacataatgtttttgaagttcatctgtgttgttgtatcagaaatttgttctttttcactgtggagtgaaaataaacaaactgtgtccgtccatacaatctcgtatggacggacacagtttgtttatccattaactggttgatggactgttgggttgtttccattttgacaactgcaaataaagttgctgtgaacatctggatatgtgtctctgtgtggacgtatattttcatcctcttgggtaaatacttaagagtagaatgactagttcatatggtagatgtgtttaaatttctttttttttgagacagggtctcactctgttgcccaggctgaagtgcagtggtgcaatcacggcttactgtagcctctacctccttgggctcaggtgatcctcccacctcagccttccaagtagctggtaggtactacaagggcgtatgccaccacacccagctattttttctgtgcttttgttgagacaaagtcttgccatgttgcccaggctggtcttgaattccagggctcaagcaatcttcccacctctgcctcccaaagtgctgggattacaggtgtgagccactacgcctggctatgttttaatttttttttttttttttttttttttgagatggagtctctctctgttgcccagcagttgttcactgcaacctctgtctcctgggttcaagtgattctcctgcttcagcctcctgagtagctgggattgtaaggatgcgccaccacactcagctaatttttgtatttttagtagagacggggttttgccatgttggccagactggtcttgaactcctgacctcaggggatccgcctgcttcggcctcccaaagtgctgggattacaggtgtgagccactgagactggccatgttttaatttttaggaaactgccaagcttgttcccaaagtggctgtaccattttgcatccccaccagcaatgttcaagagttccagctcctcctcatcctcactaacacctggtatggccagtccttagttttagccattcttataggtgtgtgctggtgtcttcatttggtgtttttatttatttatttatttgtgagatgaggtctcactctgtcgcccaggctggagtgcgatggtgcgatcctagctcactgcaccctggaactcctgggttcaagcaatcttcgggcctcagcctctggaataagtgggattacaggtgtgcacaccactgttcccagtcttattttggttttaatttgcatttctctaataactaatgatgttggacagtttttcatgagcttcttagctattcatctctttggtaacgtgtcttttcaaatgtttgggccatttttaagttgggttgccttttttttttttttttttttaagactgagtctcgctttgttgcccaggctggagtgcagtggtgcgatcctagctcattgtaacctccacctcttgggttcaagcgattttcatgtctcagcctcccgagtagctgggattacaggtgcatgctaccacacccggctaatttttgtatttttagtggagacggggtttcaccatgttggctagactggtctcaaactcctgacctcaggtgatctgcctgcctcaggctcccaaagtgctgggattagaggcatgagccaccacacccggctctttttcttttttcttttttttttttttgagatggaggcttgctctgttgcccaggctagagtgcagtggcgtgatcttggctcactgcaacctctgcctcccaggttcaagcaattctcctgccccagcctcccgagtagctgggattacaggcgtgtgccaccacacccggctaatttttgtatttttagtagagacggggtttctccatgttggtcaggctggtctcgatctcttgaccttgtgatctgcccgcctcagcctcccaaagtgctgggattacggcgtgagccaccatgcccggccctctttcttaaaagacatctttgtcattctcccctatcctccatcctagtgaaaaatcactgtttggagcaactgataggggcatctcatgcctcaggtgctagtgtggggagaacccctaatgtggcaagatggagcatgcagaaaatggatcatattttgagggagattggtacaagacattctcccaaaagtcattttgagacattgagtctttgtagcattgttcgtctgttccttcatttattgcaaatgggacagccaggcctggagcacgacccacctcctcgcctcaacctgcccacgtctccttcctcttcatccttccactctccaaggttctggcccctcagagccacctgcctgaccatgcaagctcaagtagtccccaggacacttttgctagtcacctagtgtgtgtgtgtgtgtgtgtgtgtgtgtgtgtgtgtgtgtgtgtttgagatggagtttcgcttttgttgcccaggctggagtgcagtggcatggtcactgcaacctccacctcccgggctcaagcaactgattctcttacctcagcctcccgagtagctgggattacgggcgcctgccaccaagcctggctaattttgtatttttagtagaggtggggtttctccatgttggccaggctggtctggaactcctgacctcaggtgatctgcctgcctgggcctcccaaagtgctgggattacaggcgtgagccactgcgcccggcttgtggttttttgtttgtttgtttggtttggtttgaggaagagtctcactctgtcgcccatgctggcatgcagtgtcgtagctacctgcagccttcttgacctcctgggctcaagctatccttctgcttcagcctcccgagtagctgggactacaggcatctactaacacacctaatttttttttttttgagacattgtctcattctgtcgcccaggctagagtgcagtggcacaatctggactcactgcaacctccacctcctgggtttaagcgattctcctgcctcagcctcctgagtagctgggattaccagtgcacgccaccacgcccaaataatttttgtatttttaatagagacggggtttcaccatgttggccagggtggtcttgatctcctgacctcgtgatccacctgccttggcctcccaaagtgttgggattacaggcgtgagccactgtgcctagcccacacctgactaatttttaaaaattgttttgggccgggcgcggtggctcatgcctgtaatcctaggactttgggaggccgaggtgggcagatcacttgaggtcaggagtttgagaccagcctagccaacatggtgaaaccgcttctctactaaaaatacaaaaattagccaggattggtggcacgtgcctgtaatcccagctactcgggaggctgaggcaagagaatcacttgaacccgggaggcagaggttgcagtgagctgagatcgctccactgcgctcccacctgggcgagagaaccagactgtcttaaaaaatatatatattattttatagagatggggtcttattattatttttttttgagatagagttttgctcttgttgtccaggctatagtgcaatggcatgatctcggttcaccaaaacatccgcctcctgggttcaagcgattctcctgcctcagcctcccgagtagctgagattacagacatgtgccaccatgcctggctaattttgtatttttagtagagatgcggtttctccatcttggtcaggctggtctcgaactcctgacctcaggttatccgcccaccttggcctcctaaagtgctgcgattacaggcatgagccactgtgtccggccaagatggggtctgattatgttgcccaggctggtcttgaactcctgggctcaagtgatcttcctgccatagcctcccgaagtgctgggattacaagcatgaaccactatgcccaacctgtatttttgttttttgtttttgaggtactatatatgtaacacaaaattcacccactttaagtgaacaattcagtggcatttagtacattcacagaattgtgcaaccatcactgctgtccagttccaaaacatctttgtccccgcaaaaggtgaccccatcttcattagcactaaccccctattctccattgcccagcccctgacaatcaccaatctgcagtctgtctctatccgttttcaagttttataggtagaatcatgcactatgtggccttttgagtctggcttctttcactcagcatgatgctttgggggtcatgcatgttgtagcctaaatcagcacttcattcctttttatggctgagtaatattccactgtgtggatgcaccacatcatccattcatctgttgatggacacttagattggttccaccttttggctattatgaatcatgctgctatgaacatgagtgtacacatttttgtctaaacactcatgttcagtcctttggggtacacatctaggagcagaattgctggggcgcatgcttgttgtatattcttgatcatgctggtcaccacctaacgttatttgttgtgtttctctggtgccttgaggttggaaagcctgtctctcttgtgccctcttgtgtgcctggaacatgaatgacacagaaggaggaagtgtcccagagacgtggctgagagggaggaagggagggatgggggtgtgcaaaagcttattgctctctgaggcttgcagtctggcaggtaggaattcccttctatgggatcaggtcgatcttttgcctttccagtgaggcttgtggggctgctggggggcagtgggggctggccttagtctctagctgcctttctagcctgccaggcaacgcccgcatctgcctttttgtcccacgaaggttttgtcttttggccaggggcgggggcagttcctgtcttccccctggcccttccagcggtaccacaactcaagaaactgtccccaggagggactgcgctcccccacccccgaccgcccccaacgttatataacttgtttgttccaacttctgtcttctgcaaccgagggggaaaaaagaaagagaaaagcttattctccttccttcctatctcgagggatcaacaaaaaacccgttgcctagtagaggtggtcattaatgactgagccgaacctcagggatggacagagtggggctgccctggctggggtgtgcggagaggaggtggggtccttgctgcaagcacaaaggacacttgttcaccagctggcctcctcccagctcgggccgcggggtctagactccttggagggaaaggaggcttgggccacttggggtgtcgcaaggggaggcaaaccctctggggagtcgcacctccccagctaaaattctgtcactgtgaggtacctgaccggcagagttttggaggaaccttctggccttgcagcctctccgacatgggcctttggcatccacgctttttggcccacgctccctggagacgcctgggtagggcccaggctcactgagtcatgctgttcctgggggtgaggtggggggatctgggtgagggatgtgccagcttcaggcatttgcataagaagtggtggctaggctgggtgctttggctcactcctgtaatcccagcactttgggagcccaaggcaggcagattacaaggtccagagtttgagaccagcctggccaacatagtgaaaccccctctctactaaaaatacaaaaattagtcaggtgtggtggtgggcgtctttaatcccagcaactctggaggttgaggcaggagaatcgcttgaacctgggaggaggaggttgcaatgagccgagatcctgccactgcactccagcctgagcgacagagtgagactctgtatcaaaaaaaaaaaaaaaagaagtgatggctgggacgttgtgcccaggggctttgctgcctgctgaaagtgtttgcatggaaagttgtggccgagacgctgcgcccggtgggtttgtcacagtcagtctggctgggtggcctttgcctgttgaagctttctccacaatctagatcatctccaccaagcccagaggccttggaagggtccagccccccagctcctgctaggaagacttaggggaagaggtggcttcccaaggaggttcttgctactttggggaagttctcattcctttggcctcttgcccctttcttttttattattattaattttttttgacgtcactctgagctcaggctggagtgcagtggcatgattttggctcactgcaacctccgccttctgggttcaagtgattctcctgcctcagcctcccaagtagctgggactacaggcgcccactaccatgcctggctagtttttgtatttttaggagagatggggtttcatcatgttggccaggctggtctcgaactcctgacctcaggtgatccacctgccttggcctcccaaagtgctgggattacaggcatgagccagtgcgcccggcctcatgcccctttcagaaggaggattttgacccttccaagacgtggactcaagtccttctcctggaaaatgtggtcagatatggcggcatgaggtgtctcatcatacccatgggtgactgtggctccctctttatgggttgtggctgtgacagattcctcatctgggaaatggggctccaggcccaccaggtggggggtgtctgggaggaaacgagtggggagaggtcacatgtacctcatcagtgttactgtggcagtgctgacgcccatgatggggacactgccatccttctgcccgccatgcccgcatgggccttgaggggatcgtcaatgccagcaagccttgatgtggcgtgcgtgtgtcaggcagggaaaggagagggtgaacttgagccattgggaagacagtagtgccatgacttgggccgtaagagggacagcagcaggggcagcgagagagtagagcacgtccagcgtgagctggagagggcaggttccgccaggagtaggcctgggagcaggagctcggcagggcgggggcaggggcggcggggggtggcgcgtctcagcagggatgggggcaggtggaactgggccagcccaagaagggcactggcccacaggccgagccacatccaggccactcgatctgcccctcacagctgagccccttctctgggaaggaggccaccctctcctcccctccttgtcggcaggtcccaagagctctgggagtggaattgctctgaaagcactcacttcaacctgaatcgtgcagtgcgatcgtcacagctggactgtttccacctggtagctgtgacccccgggacggcctccttgtcgttgtccgtagttaccggggaagaaaggctttattaccctccgccataatcgcaccatctccagggagcccctgcgaatgtcatcccacctcccccacggcgattactttttatctcacccacctctcctcagacactgtaaaagggaggctttctcctcactccagccctttggttttttcctttttctgatatttgtgtgtgtgtgtgtgtcttaccctttggttttagggaatgttttagatttggtgttaagaggccctggaggaggaagagaggaggaggaggaagagtggaggaagaggaggaggagatgagagggaggaggaggaagaggaggaggagaaaaagaggaggaagaggaggaggaagagaggaggaggaggaaagagagaggaggagaaaaagaacaggagaatggggagggagagaggaggatgagggggaaggacacagatagaaataattcagcgacttggggccttggatcctggaagaagggggtgggatctactgaaggcaaggggtgactgggcagcatgtgtcccggcatccccagctctttgctctgtggacaggatttgttagacacatttctctgcctttgtgcaggtgccacagtctcctgtgtccaccccatgcctggtgctggacatgaagggtccatgggacagatggaccctgcccatggggcgcatacatgccagcaggagttagagaacgtcgtgcggtcatttccgggctggctgggccagggggccagggcagggtttgggtgagcggcatatcagtcagcctcctgttttgaaaggatccctctgtaggccgggtgtggtggctcacacctgtattcccagcacattgggaggccaaggcgggtagatcacttgaggtcaggagttcgagaccagcctgggcaacatagtgagatccagtctctactaaaaatacacaaaactagctgggcgcagtggcgggtgcttgtagtcccagctgctctggaggctgaggcacgagagtcgattgaacccaggagccgagattgcaccactgcactccagcctgggcgacaaagtgagactctgtctcaaaaaagaaaggatccctctggcaagagacaagggaccctcggccaaggtgggccctggagggatggagaggcacacgcaggcttggggatgcctggaggttgagcttgtgctgactgatagtggtggccagtttctgccctccccaccgggcaggctgaaggtcagggttgtccttggtcccgcgcggctgcactgcctgcaacaagcagcagacttggaggcgccacctggcctaggggattcgcagcccttcctgtgttccagaaaagcccttcatgcctctccttgctcagggttcgtgccacttggagctcccacagtccttgagggcttcaggtcttcccaccagcaggtcccagtcctgggaatgtccctcctcctgagagaaggcctcagtctggctgcagctgcccaggaggtcctcaggtagcatctcttgtgggttccaccttcgagccacagcctggagccagctcctcctgctctctcctccccatcccagctcagagccactcctggctcttccccttctgggcatcatccccaactccagccagcgggaccctcctaaggcaggaatcagaccacctcactcccctgccggccacctgccagtggctccctcactctcagaacaaaatctacttcttgatgtgacccgctgggcccctgagcttccgcagctctgacggctctgctgggctctgaagcacgctcactggaatgtcctgtcccagtgatttgcacggctcaagtgttgtctcctcggggcctggccactgtgtccaccgtggcgccactgctcgccctgtcgtcatggtacattctctgcttgaggacccatgtccctgtagaatgtacgttccccaagggcagggctttatcagatctttttacagtggtggtcctggcgctggcacagctactggcacgggatggatgcttttgagtgtagatccagtgagtaccccaccccgaacagtcttcgatgcataccagaggggaagcctcctggcatagctctgcatgcccaggctggccgagggtcatccgcctcttcctcttcacttcattgaaccagcagggtgtgggcggagaagcagaaattcacaggcatgttgtcagtaaaccagccctgttacctgttacagagcccagggcaccataccgttttgcgtgtgctgtctttagtgagtgagcaaaacctcagccctgcatgttaaagcaaaggcggcaaacgacagccgctctctccctgtccagctgtctgaagtggaagtgggggccaagcccgctgggttcccgctgccggcagccccgccctcctcctctggtagccgctctgcagctgtgcggaccagctctcttaacacttgttaaccccagcctccagtcccttcctgccccccaccccgccccttccacatgtctctccggagagggccgcacagaattcacaggactcgtctccaacggctgcgccagcaattccctagcattcctcctctgcagagtggattttggtgcatgtccagcgtgatttcagacccctcactgcgcagcggagtgcctgatcgctctgtgtgcaccaccacggtgcacactgaaaatattgtgatctgggaggaagtaaccagcaccttgggggaatcacagacctttcctgcgagggcaagggcttccggaattgaacaggctgggcctggaggagatcttgaggggtggaccttcaggcttgtaaaggcctggaggggggtcacccgaggatcgaggccgaagatgtttactgacgccacaactgtgaaattccacaggggtcaaagacggacccgggcgggagcggtctgggctggatatccggagagttctgctctccacgggatgttagaatttgaggcagtctgcctaaggaggcagagcagagaggcatgtgatcacccagatcgtctgagagcgggacattttcccggagcggggtggaaggagtgtcaaggtgactgtgagatgacagacacgtaggggagccccacagaggacccccaagacaccctctctgttgccatcagcctgagtcatcctctatctgaaaaacttccaggactgaagttcgagttggaagcacgcgttctccttggtgaagtccgtcctgtcccaggagggctgcgctaggtctctcctctggctccccctcctcgggtcctcgtggctctctgtcgtgtgaagcggggggtcaggagcgcacaaatgtttatactccacgtgagtcacttgcacagatgacgggtgatgttttcctcgccaaggctgatggcaccgggcccctttgccgttccagcctcagtcacgcctccagtctgttagcatttagagttgctgaactttcgcattggtcaggggcgcgggcagcttgctgaccttttctgggagtcgtggcggacggagtggagccgtctgtctcgtcacagacaggcggggctgcggctggggatggccgccgcccactcgccctcagaatggccctcagcggggcttcctgacccctcagccccggtaggaagctggtgtgcactgcagggagaggcggcagctggaaaagtgttaaggccacagtggtttttccagaggctcgtctggaatgccgtggctggatctgagcctcctgacatccgaggcccctcttggtggggagagccagaaacccaagatactgccgtcagttaaagactcgaagttcacattttaaaaagtgcaaggagacacccggttttaggtacgttggggtgcaaggtctgaaggctggaatctgtggctcccttctttcagctctgtcatccctcttgtctgggtgctgcccacctggtagaaaggggacctcaccttgccactccactagcctgccaacaccaccaggaaggcgacccttcatcctggtggctccagtaaaaatcccagggaaggctctgattggatcagaagggccaagtccccatcccaggatgaatccctatggccaggggccctggagcctctgtccagtctgtgtcacatccatattttcagcccagcaatgggatctgcctgatctccaccactggggctgagcatagagaagaggaggttccagaggagaacagggggcccttatgagaagaggggagggatggtaaacaccccaaaaatgaagatattcatgacagaccccctctgatgctgaaatttgtgttgtctttggaaggtgctgggctaagctgtggagtgcctgcatctggcctggctctgctggggatgagcagtgccatgtggcagccccgtcccttctggggcttcaacacctgtcctgccagtggaggcagtggggtgggctgccttgcagcacgttaccaccccgacatgctagaattcagcagtgctagaatttcactgggtttccaagcggtgctctggagctgtgcagtcatgtacctacttgcctgaactgtggagtgaagggatttgctcattcaagtggtccctgctgccggcccaatgcagtgggaccaagtcgggggatgggctgtggcagaagcagtctcacctcagtgggagggaatgggaaagggaagcctcaggccgagacctgcccactcgtcagccctggatggggacccagctgggccatgagggtgaggaaagccatggcagagaaggctctggggtggaggcagcagaggtgctgagtgcagaaatgctggtgggctcaggagtgtggtggagggagaagggtctgagggcaagagggttggccactcagcacagagcacaacatgagcaaaggtccagagacaggatgtgcaggagagtcccactgagggcttcgcggtggatcctgaaggatcacatacactaggactcgggccaggaggtcttgtggggaggaacaagcagtgagctaagataagagttgggctccagcaggccaggtgcggtggctcccgcctgtaatcccagcactttgggaggccgaggcgggcagatcacctgaggccgagagttcgagaccagcctggtcaatgtgatgaaacctcgtctctattaaaaatacaaaaattagctaggtgtggtagtgggcgcctatagtcccagctactcaggaggctgaggcaggagaattacttgaacctgggaggtggaggttgcagagagctgagatcacaccactgcactccagcctgagtgacagagccagactccatctcaaaaaaaaaaaaaaaaaaagagttgggctccagcccagtgctgccacctgggagccatccacctgccacctcactcattcactcaccctcaaaccccacctccctggccagcagcaagctctctgcctccacagcacccctcccatcctggcttgtacctggaccacagtgttggggcgtccccatcagaacagcctccacgaaccaagggagcacccactttgtataaggccatcaactggggtggtgcagttctggttcctggctccgttgtcggcaggcagcctagaaaaggggcacggctatcatcccattttacagatggggaagttgaggcacagagaggttcaggggctcatccaaggccacacagtaaacaagaggcagagggacactaggtatggccagcagagaccttctttggccagtgcacaggtgctttttggccttttcatggtcccaagtgggtgggtcctatgatcatcaccatgatgcagatggggagactgaggctcagagggctgagactgctcaccaaggctctgcctgagcctggaggatgcatgtggagctaaacagcaggaagagcaagacaggggctcttcagggccggcccagcacaaagatgtggatttatctgtccatctatccacccacccttcatccaccattcatctatctgccacccactcactccttcttacccacctgttcacacctatgtccaccagttcacccacccacctgaccatccatacctccacctgtccatccaccccaccacccacccacccatccgcccacccacccacctgcccctatccacccatcttttcatcagtccacccttccatccacccacccatccacctgcccttccatccacccacctacccatgccacccacccttccatctacccacccacccatccatccacccatccacccacccttccatcagtctacccttccatgcacccacccatccaccctaccatctacccacctaggcacccacccacccttcacccacccacccatccatccacccgtccacccacccttccatcagtccacacttccatccacccacccacccacccttccatctacccacctgcccacccacccacccacccttccatctacccacccacccacccatccatccgcccttccatcagtccacccttccatccacccacccacccttccatctacccacctacccacccacccacacacccaccctttcatctacccacccacctatccatgcacccatccacccacccttccatcagtccacccttccatccactcaccatccacctgcccttccatccacccacctgtccacccacccacccatccatccacccatccacccacgcttccatcagtccactcttccatccacccacccttccatccatccatccacccacctacccacctacccatccatccacccatccagccatccacccaccctttcatcaggccacccttccatccacccacccatccacctgcccactcttccatctatccacccacccattcatccacccacccacccacctacccacccacccatccatctgcccttctgtctgtcacccatccatctgcccttccatccactcatccattaactcatctactgcccatccaggcacccttccatctacccatccacctgcctaccactatccatctaccaacccacccacccatccaccaatccactcatccaccatctgcccactcatccaccatctgcccacccatccacctgcccgtccagccacccttccatctactcacctatcactatccatccaccaacccaccatccaccaatcctctcatctaccatccgcccacccatccatccacccatccaccaacctacacacctgtctgtccacccatccacccaccctttcatccatttattcacccatccatccatctacccacccagctatccacccatccattcatccgtccatccgttcatccacccatccattaactcacctatacatccacgcaccctttcatccacccatccacctatccatctacccacccatctatccacccatccatccactcatccattcacccctccctccacccacttacccatccattcacccgcccatttacccatccactcaccgattcacccatctacccacccattcatctgtctatctaccgtttgcccatccacccactcatttacccatccatctacctgtccattcatttgactgctcatccacccatccagttgacaagcatgactgagctccaaccatatgttaggcatggcggtgagcaccagaacattacaggagacagaaccttgcctgctcggcttccatggggttcccctttcagccatggggagacaggctggaaacagatgatgtggcagatggagtgaggagcagggaagacaaaaatggcccaggtggggatcagggaggtggggtggctgatgagccgtagaccgaggctctcccagcgggacctggcaggcaccgccccttcatctgtagagtggggttccctctcttgcagggcggctggaggactagtggggtaaatccacattcttgcctggggccggccttgaaaagcccctgtcttgctcttcctgctgttcagctccatgtccatcctcccagctcaggcagagccttggcgagctgtctcagccctctgagcctcagtctccccatctgtgtgatggtcacgatcagaggcccacccacctgggaccggggagaggtcgaccagcacccgtgtgttggctgaggaaggcctcctttggccaagcctggtgtccccctgcctctgtttactgtataactttgggccagtggccgaacttctctgtgccttcatttccccatctgtaagatgggatggtagcagtgccccatcagagactgcctgccacaaggtgggccaggagccaagactgcacagactgggtgctccctcggtccgtgaagactgttctgatggagacgccccagcattgtcatctggacatggagagccaggatgggaggggtgctgtggaggcagagagcttgctgctggtcagggaggtggggtctgaacacccccttgtcttctgggcctttgtttggatggtggggcttcctcttgttggccttgagaagtggctggagtttggcaagtccgggatgggggcgctgtgcataatgtcttcctgtccattggccgcagtcagagccccacacatcctggactcctggtggcattggtcagaggctgggattagggcaggacatcacagcccggccttgagggcactgggcttatggtgacccctgaggagcaggtgaggggtggccacacgtatccatcatccacccacccatgcctccagcctccttcctcatctagaacacccccatgctcctgagatgacagcttgcaaaccactgcacctctaaccccctgttttctggaaggtttgagcaaggctcaggaaaggggaggccacgcagcttgccctggcttcatggtggggttggtgggggacctgcaggatgggggtggacgggcctcagctttctgctcccagctctgtgggcttcacctctcaacctgctgagcctgagagcagggagtgtctcctgccacctcactgggtccttggggtcattggtcgtggtcctttccaattgatcctcgattccgaaacctgcctgcctgccctccctgaactcccggtgtgacttgggcagcccgccaccctctctgagccttggcgtccctggccgtcacttggctgtctgggggtgccagccctgggtacagtggcctcctgctaggcactcccagatgctctgtctcctgtcattctgtccccacccagcaggcacagacaggctgaagccaaggacagacaggcagggaatggctccagatcaggaggctgggaggaaggggaaggccagggcctccttcgcaggggtcagagggcatccatgcaggacgctgtgtgagttgggccaacaggcgcaactcacggcgagccctgtctgcctcagtagcgcggggctcttggaggaggcttgagggtgggtgggtggggaggccgcgaggttagggtggctctgaccctgcctggcctgcccagcacgcctgccctcccagcacagggcgggagtggcgggttcctgtttgaaatgattcgtgaagatgttggagaaaatcagcatgtcaagcaggagggagacacagacagctgcaccctggcggcccctgagctgcagtctctgtctccctgtctctgagtctctgtccctctctccctgggtctctgtctccctgtctctgggtctctgtccttctgtctttgcatctctgtctctgagtctctgtccctctgtttctgcatctctgtccctctgtctctgggtctctgtccctctgtctctggatctctgtctccctatctctgagtctctgtccctttgtctctgggtctctgtctccttgtctctgggtctctgtccctctgtctctggatctctgtctccctgtccctggatctctgtctccctgtccctgggtctctgtctccctgtctctgggtctgtgtctccctgtctctgtcatgagacagggtcatgagagaaggtatcagtgtggttggagtctctgtctccctgtctctgggtctgtgtctccctatctctgagtctctgtgtcttcatctctgggtctctgtctccgtctctgggtctctgtctccctctccctgggtctgtgtctccctgtctctgagtctctgggtctctgagtctctgtgcctccatatctgggtctctgtctccctgtctctgtgtctctgtctctgggtctctgtctctttgtctctgttgccatctctgtgtctctgtccctctgtttctgggtctctgtctccccatctctgtccctctgtcccagtctctgggtctgtcagtggctgagtgtcctggcctgctgggacactgcggtggggccctgcacccgctcctggctctcccacttgtccatccagaagccattatctttcctccactcccacgggagccaagggaggcagagaacagcaggtgccttggaaggggcggccccttatcaggagggataaccccaggaagtagccttgggcagtctgggggagaagcagggcggccgggcctcaggggcctctgagctgtcccacgggaaagcttgctgacgtgagcgtgggggccggagcgtttgagggccagcatgaggtgccggaacccagcaactccatcctgtgggctgggagcagttcccagtgctgtgaaacattgtggtcaccatggcaacagtactgggggagctgcctttgtggaatgggtgggaccctgcctctttgcaccttttaccctcgaggcacgtgcccaagagccagtgaggactgcagctgctggtggccaggggtgggggtggcgggggagcaggggcacgctgggccgcggtgttcccatcttggagagggatactgagcctgtgatctccccggctgctggggatttgtgaggctgcatgtgaagacctgtgcctgcttggcaaggtcagagtgggtgggaagggtcatgagagaaggtgtcagtgtggttggagagtagggtggtggctgtgaggctgagaggttggtggtgggattccaggccccccacagctctggcactcgagccccacaccacctcccacactgcctggtcgctgtcacccccacccctgccaccatttctgcttcccttcctttcactggctctctgttcctctctccctgtatttctctccttgtctctctgggtctctgtctccctgtctctgggtctctgtctctccctctccctctctccctgggtctctgtctccctctctccctgggtctctgtctccctctccgtctctctaggtctctgtctccctctctccctgggtctccgtctccctgtctctaggtctctgtcttcctctctccctgggtgtctctttctctccctcttgctgggtctctctttccctctccctctggatctttctctccatctccctctctctgggtctctgtctccctgtctccctgtctctaggtatctgtcttcctctctctctgggtttttttctcctcttgctgggcctccgtctctccctctccctttctctgggtctctgtctccctctctccctgggtctctgtctccctctctctgggtctctgtcccctctctctgggtctctgtctgtccccctgtccccctctctctgggtgcctgtctccttctctctgggtctctgtctccttctctctgggtctctgtctacctttctctgcgtccctgttcccctctgggtctctgtaccctctaagtctctgtccctttatctctgaatctgtttttctctctctgggtatctgtccacttctctctgggtcctgtttttctttctgtgggtcccggttcttctctgggtctctgtcccctccaagtctctgtcactccctctccgagtctctgtttccctctcttgctggatctcagacaaggctctcaggatggtcttggtccagttgccagcctgggactggctgggagagaggctagggattgggcagtggcttctcagccggccctgacatcccctgctgtcccctgaagtacagcctcttccccacccatgcactgagaccctggggcggcatcgcatcagccggggtgggagccaaccagctgtgctgtgctgctgtgctccttcgagccacatggacaataaaaccaaaattggctttgaaagtggaagtgctctcctctttgaggggaagtgagggactgcgcgcgtcagaaccgcctatgaggggcaatgccggcaggctccgttctggcccgagcgctgggctccgcgtgggggtgggaaaggattttacaaaaccccaaagaaatgtttccatgaaattctttcttgttcttgccttttttttttcttttttggacattccaatgaaaagaaccgttctggggctttggatcgcttctcatgggttgggaagccgaccatggagatgaggccagcccggggccggaggaggggcgcctgccctgacaggtgcgtgcccctcactcttgtccccctaggcagcccccacctccctctgctcctgatcctcccacgaggcttcatccctagggtgcctggccgcaacctctgcaactctgagcttcttgtgacctcccccacgaggccatcgtgccttgggctgggttcccccagagcagactctcaggcgggggttcgagggccccacgaaagaacagcgtggggagggaaggagcctccacagggtgtgtcagtagtgagcaggtggtcccagggcaacccttggagatctcgggaatcccataacaggtggtccacctgggggagtttaccccacccaggctccctggatgttagccctagcacatccctgcactgggacatctgagaggagcaggggtggtgttgccagggcagacctgggcgtgtccttgggtccagcacaggcctgggcctggctagggtgcccgatgacattgctggggggatacagcggcaagcgggtgtcagaatggcccctagcccgggccaggcctgtagcgggggcgtgtggccactcagaggccagattcgggcagagggtgcagccagggcgggcagcaatggcctcttgagacggccctggccggggctgctgacgcattggctccgatgactcacgtgcgggtgaccgtcactcgagtggccgtctggagactcggaccggctcagggccaccgccttcctgggggcctgtggccccgccgtgccggccgccccctgtctggaccagcctgagtaatgggtccttcccctcctcccagtggccggctggagaggaccttagtcatcagccctggccccggccctccctcctccgcctgcccacctccgcccaggctgcgtctcgcttctccgtccaggctgggggactcctgcccctcctggcctcctccctccttgagttccccaggaggggctgcagtggggtgggtttggcttcacaggggcggcagtgagggtgacgtcaggggcctcagggacagttgtcccatccctaagatgagaggaaggaaacagccatgtggaacgcgtcaggcatcaccagggcatgaggaggaggcctggggaggacaagctgcttcctcccctctttggtccagcgtgggccctgtgccctgtaaccagcagtggatgggcctcaccctgctttctgggcctggggtgtcctaaattccagatgggagcatccagattctccgagtgtgtagtcgtcacgtgctagtggcagcctgggtcccagggctctgcgtttgctcatctcatcctccagcggccctggggctggggagctggatggtcatttgcccctgctttgtagctgaggcctgggtggttgagtgactgctgagttcccagctaaccagagctggcttggcccaggctgctggcccctgatgtctcctctgagatgccctgccagtcagctgaactgatcctgccttctgggttccgggcaccctctctgcttgctggggaacccacagatcccatgtttggaacactggcccacctccctggtttcctgttcctcagtcatcagagtagcagggtgcagggcagtagctcctctcctccccagagggaggtcctctctgtccaacttctcagttctccagatatgttctgtgcactcatgggcagatgcatatgtgtggcactttgagcccaaatagcatcccactgtgtgcactctgcctcttccttcctcctgcagccttgacgtcatcccctgcatgcaacatcttccccaggatgcgtcagcctcctcacccatctatagggcagccctcactcagaaggtgctgtgattccacgaatctcctttaagggtggttagcttatttctcgtctgtggcccctagagattgtatttgggtaagtttcagaaatagagttcttgggtaaaggacatgagcctttagagtgttgctgagtctacgcagctgccttcctgggggtcaccttgcttcataagccccccgagagtgtgcttccctgactgcaagcgaggctgactcttacgtccttctagccagctctgcttgctttcctgggaaccattagcccacattctttgtgcatctttcgatctcactctgtcacccaggctggagtgcagtggcacaaatatggctcactgcagcctccacctcccgaactcaagtgatcctctcacctcagcctcccaagtagctgggaacacaggctcatgccagcatgcctggctaatttgtattgatttcttgatgctctttatatatggaagagcatggtaaatatgctcctaaggactgagtggccccgtggtgaacttgtcccagtgcaacgtgtttcttctgatgaaaatgtacacatgcacacctgcctccaagggctttacaggaggcacgagaagtcctcccatccctccccgcaaatctccttgaacttctaaggaaaaaccagaccaaaatcaaaatggcaaaggctggcaaggcccatgcatacttctgggagacaaagtgtccacagaaaggccggcaggggtcacccagagcccgaatgcacaacccttgccacagctgcaacacaaagctgattctgggtgatctgaccccttttggtccccattgcctggaccgcgtgcccatgaggacggggcctacttcgtctcatttacgcagcatccctgcatgcacgggcagggaagaggagtttgcaaagccagtgaggcaaactggggacaaggagagaccttgagggtcctcagaggcacatgcaggatgcggctttggccccaggcagcctggacacccgtcgcagggtgtcggtgagagggcatgccattcgtgggaagcaatgagaccctgccctggagatgtccaggcaggtgctggacccctgtggggggctggataggggagagcggcccatgagcctgcgacatgctcctcacaagcctcggatctggatctgtcatgggtctagggaaaaaagagccaaggcttggctcagggcagcagcctggtcaagtgggatcggggccgatgtgtggggaggggaggaagggaggaggggaggtaagcgtcccttccacttggcaggggaaaggccacggggacaagccagagtctcagggtgcacctggacccctttccttccctgccctcctcagctttcaaaaggctgcacccccaccctcccaggcaaacaccaggtctgggctccagcacccccagcaccgcagcattgctggccagcccagatgaccgtggcattgggctctgagtagcatatgtcctgcttccccagggactcaaaggctttccactgagcacaggccccacactgggtccttcgtgctatgtccccaccctctaggacatgcagtgcctcgcaggcagggctggggcttgggcaacttctctgcctgtggtgccttgcagggctgtggtcagcgcctggccctgaagcccctctccccggcagtttgtcttgatcactcaccctttcccaagggtctctggaagggtggtctgaaggggaggtcagggacctccggtggcagctgctatgttgactgagtgcccactgtgtgccctgtgtttgacgttggctctttaatgcccactgtggttttggggctggctggcagtggggccaaggagccttccgtctcctcccgctttcttggaaagatcagtgcccgcattcctggcctttgcttacaggcaggcgtgggtcccaggaatgggagagcaaattccagagggcagaggccaccaggacagagcagggtgcctcagcccggtgggggtgggggtcttagaggggactgatcctggaggtggcaccagggtccaccccctgttgtgttctgaggaagaagtggtgtgttaacggctcctaagctattaattcattgatccgttcaacagtttccccaaatgaaatagcaaaggggtggtggggctggagaagaggggatgagggggcagtaggggcagtgggggctggaccacagagggctcgtatactctggggtgcagggggctgtggcggggcttgcaggggacttgagaaggctcccgtgtgtcctttggtttttttattgaagtgaaattcacgtgacataaaactgtctgaaagtggacaattcagtggcatttagtagattcacagtggtatgcaaacaccacctctgtctagttccagaacattctcatccctccaaaaggagaccccaccccatcagcagtcactcccccctcccctcccccagcccttggtggcacccatctgcttcctgtctctgcggatttgcctgttctgggcatttcacgtcagtggagtcatacacagtgcggccttttgtgtctggcttcttgcactgagtgttgtgttcaaggtaatagtgtgtgtgtgaacctctgggccatgtccccacctctgctttccccgcagcacggccgacaagaacggggccctcaagtgcaccttctcggcacccagccacagcaccagcctcctgcagggcctggccaccctccgcgctcagggccagctcctcgatgttgtgctgactattaacagagaggcctttcctgcacacaaggtcgtcctggctgcctgcagcgactacttcaggtaagtgctggccccaggcagctggaaggggcggctgcctgttgggacagggacagggcagatggcacccactttctaaagggggcctgtctcagcgctacccagggacagcttcgagggagaacggctggtaccggctgctctttttttttttttgagatggagtctcgcgctgttgcccaggctggagtgcagtggcacaatctcggctcactgcaacctccgcctcctgggttcaagcagttctcctgcctcagcctcccgagtagctgggagtacaggcacccgccaccatgcccagctaattttttttgtattttttagtagagacggggtttcaccatgttggccaggctggtattgaactcctgacttcgtgatctgcctgccttggcctcccaaagtgctgagattataggcgtgagccaccgctccgggccccttctgattttagagagaggtttaatgtccagtaaacctgcaggtttcccggagtttgcatcttactctctttgggcagaacatgcctggagggacagagatggcctgtgggcacccactcacttctaccctgcatgcagggtggcagggcttggccaggtttttgatctgttttgttttttttttttttgagacaaagtctcgctgtgtcgcccaggctggagtgcagtagcacaatcttggctcattgcaacctccgcctcccgggttcaagcgattctcctgcctcagcctcccgagtagctgggactacaggcgcatgccaccacacctggctaattttttgtatttttagtagagacggggtttcaccatgttagccaggatggtcttgatttcctgacctcatgagccacctgcctcagcctcccaaagtgctgggattacaggcgtgagccactgcgcccagcccaatctgtctttacttgacgcctgctgtatgccaggcactattctagtccttgggatgcagcagggatgacagtgaaatgggcacaagcccctgccctcagggcatcccctcaggacacctggagcaggacagctgggggactggaggggcatcgagggccgcagagaccctgtgtctgccaacaccatgtcctgggctctgtctgaggcccagatgagttctcctccctgtctccctgagctgtgggcacttccccaacgtgacagaagaggccatggcgggcactgtctgtctgtccctgtgccgtggccgggccggaagtgagagcaccacagagcagggctgtggggtggggggtgctttctcctcgccagctgggggctgttgcagggctgagtggtctccctccctgggtgaccagcaggtgagcctccttcctgccaggtggtgaccccgccagagagagctgggccgccctggggaggctcccaggccccagcccaggtgtgccgctcagccacacattccccgaggcccgggccgcctgccccatgggctcaatgaggctgttgtgggggccgcagcagccgagccaactggggcgccgcttctatttttattctggatttggggacgggtgggccagcccagccagcaatgccctttaaaggctcccctgtgctggcactgcagccagcgagaccttaaaaggcaaagctccctcctgtcgcctgcgaccgcctctgccttcatcgcatcatgcccgagggccagcgtggacccgtggggacaagcggggcagggtctggggagctggcagcgtacttactgctcctggaccgctcagagatgctgaagagctgcttgttgggcagatgtcagtgggcggccccgagatagtgccctggcagctgtccttgcccctgtagccctgagcctggctcacaggaggtgcaagactaggggacaggcctctgtgggtcaaatgcacaagggatgttccctcctcctcggacggccatcaggggaggtgcactggcaggagtgagagttactatgccatgccattgcgcctcctggaaggaaccgcccattcccctggagctggggtgctctcccctcttctgctggggaacaccctaaacgctgtaggggaactgtgacctagaaccgtgtgcctccccgctgccctccctcacgggggcctgtgtcccctcccactctcatgttctgcctcgcagagcacagcagtacaagggcggagctggggtctcaatggaggctggggacgtagctgttgggtgggaggtgcttccccgaccacctgagcctgtctctggagacagcagtcaccccagcacagcctcctggtgggggctccattcctggggaccctcattaccttcccctcttcacatgatggttgttgagactcaggctgggcatatcagagctgcctgcttaggtcagtgaacaaggtgagggttgaactgtggtgcatggcacctccagagcactggccttgcagttcctgagctcaggtgtcaagtggggctgcagatctgtccccagagccacagggtgtgttctcatcctgcactgccatacctggcccctctaaccgcacccccgacaggcacattgtgggtgaggctgacccgggccaccgctcctgcagctccaacacgatctagtcatgaaggggcaggggcagggtcctctgcagaggggccaagcagggagttgctatttataggaagatgcatggcttgggtggattcaaaatctttttttttttttgcatgttttttttgtttgtttgagacagagtctcactcttattgtccaggctgcagtgcagcatgatctcggctcactgcaacctccaggttggtcttgaactcctgacatcaggtgatccacccacctcggcctcccaaagtgctaggattacaggcgtgagccactgtgcctggcctttgcatgtttttgtttgtttgtttgtttgtttgtttttgtgactgagtctcactctgtcacccaggctggagtgcagtgccagtggtctcgatctcctgatctcatgatccacccgcctgggcttcccaaagtgctgggattacaggcatgagccaccgcgcccggcccctttgcatgtttttaatgagcattccgcctactttcctcttgctggctgtgccctgtgttctgtgtccccaggctactgttccccaggccagatcattcctggctggccaaaacacccctcagccactgccagccacacgttgtgtttctgcccttcagggccatgttcaccggcggcatgcgggaggcaagccaggacgtcatcgagctgaagggcgtgtcggcccgtggcctgcggcacatcatcgacttcgcctacagcgccgaggtgacactggacctggactgcgtgcaggacgtgctgggcgcggccgtgttcttgcagatgctgcccgtggtggagctgtgcgaggagttcctgaaggcggccatgagcgtggagacctgcctcaacatcggccagatggccaccaccttcagcctggcctcgctgcgagagtcggtggatgccttcaccttccggcacttcctgcagatcgccgaggaggaggatttcctgcgcctgccactggagcgcctggtcttcttcctgcagagcaaccggctgcagagctgtgccgagatcgacctgttccgcgcggccgtccgctggctgcagcatgacccggcccggcggccgcgcgccagccacgtgctctgccacattcgcttcccgctcatgcagtcgtccgagctggtggacagcgtgcagacgctggacatcatggtggaggacgtgctgtgccgccagtatctgctggaggccttcaactaccaggtgctgcccttccggcagcacgagatgcagtctccgcgcaccgccgtgcgctcggatgtgccctcgctcgtcaccttcggcggcacgccctacaccgacagcgaccgctcggtcagcagcaaggtctaccagctgcctgagccgggagcccgccacttccgcgagctcacggagatggaggtaggctgcagccacacgtgcgtggccgtgctggacaattttgtgtacgtggccggggggcagcacctgcagtaccgcagcggcgagggcgcagtggacgcctgctaccgctacgacccccacctgaatcgctggctgcgcctgcaggccatgcaggaaagccgcatccagttccagctgaacgtgctgtgcggcatggtgtacgccacgggcggccgcaaccgagccggcagcctggcctccgtggagcggtactgcccccggcgcaatgagtggggctacgcctgctcgctgaagcgccgtacctggggccatgctggggccgcctcagggggccgcctctacatctcgggtggctacgggatctcagtggaggacaagaaggccctgcactgctacgaccccgtggccgaccagtgggagttcaaggcgcccatgagcgaaccccgcgtgctacacgccatggtgggtgccggcggccgcatctatgccctcgggggccgcatggaccacgtggaccgctgcttcgacgtgctggctgtggagtactatgtgccggagacggaccagtggaccagcgtgagccccatgcgggccggccagtcagaggccggctgctgcctgctggagaggaagatctacatcgtcgggggctacaactggcgtctcaacaacgtcacgggcatcgtacaggtgtacaacacggacaccgacgagtgggagcgggacctgcacttcccggagtccttcgcaggcatagcctgcgcccccgtcctgctgccccgggccgggaccaggaggtagcccccaagacccccgggaccctggcctgaccgcatgttgtctccaagtggggcttggcgaatgcacgtctgcctgagaaccccagtgccccccttcgcccgggctgcccttgaggggcctgctgcgttgataagcccccctcccaggggtccctccctccctccttcccaaagcagatcctggctgcgagtccatccgagggagcctgccggcaaagcgtctgacatgtggtggcagcaaattcgtccccggggtggtttcctcgcctggcccccgagtccccacgggctggcgggtggaatcccaggtctccagggggtccctgtgcagctccatctcacttctctactgcctcccagccccacggtttcaggcattcagatgtgagctcatcaacattgaacccaaagtcggtggtatatgactcaccctccttccaagtctcctgcgcgcgtgtttttaaaataaactcacccgaaacgtccgtaacacacggacctccaggagcagtgagaggtggcttagaagcccctggtttggggtgggtggaggaggagggcacgtgtctgcctcccctggggtgccctccttcccccatcccaagctgctgaggggaggccctggtcatgcctcagttcctgccttcatctgctttccggaggaaaaaccatatcaactcctagaaacgctccttaggggcttgggaccttccatttggcactgagcatcttgtggggccttaactggctgagacatcccggccctctacatttgccctgttggccaggcagtccccttcccgcaattggagggcgacgctaacttcagaatcccatagtggcgcttgccgcaggtctggtggggtgtcttttttctcctccctcctttccacccctccgcgccctgccactccctggcctgccctgtttttgggtcaacattgctacggagccagcagtgaggcctttcccttcaagggctctgtggtatctctggccacatttgttctaatgtctgaacctctaaatcttttctttttgattggttttactgtttttaagaagccagcactgctgtctcatagatgggatttgtactcttggggcaacttaaagtgtctctctcgctgctaacagacgattgatgtcttgtctctgtgacccactcaccatgtaaagaattaacctcctatcttagcagacatcgtctcctaatatttccctttatttaataaaaatgttatggtgaagagatggagccggcccagcactgagcttgtgcggcttgggtctgattggtcacagattcctcgtgtgtcctccgcgtgtctgggggctcctctcccccgcctcaaccttttccagcctttcagaggagtcggcagtgggctgggctttggctcaggggcgcagaggcagcaggaagcgtggccaggactttcaccctggcgttttttgttgttggtttttttgtttttttgagacggagcctcgctctgtcacccaggctggagtgcagtggcgtgatctcggctcactgcaacctctgcctcctgggttcaagcaattcacctgcctcagcctcccaagtagccaggattacagacgcagacacacaccaccacacccggctaatttttgtatttttagtacagacggggtttcaccatgttggccaggctggccttgaactcttgacctcaggtgatccacctgcctctgcctcccaaagtgctgggattacaggtgtgagccaccatgcccggaccaaccttggcactttggaagagccttcagccccctattctcatcatggccggccaaactatgaactgggctgcccagagcaggccacttatcagttgcaggttagcagagaaagcctgatgttcccggacggccttcccagaagggaggccctgggatatcacacacacatggatctccataagttgctgtgcctgcatgcctggcgctcctgtgtggcagccatcggggctggggtaacactagaggctgagggggtgggcagtgctaaaataggaacatggttgggaacctaaaagaagcccacactgtcaggggcatcgagacaaaagccgagttccctggggacttaccagaacattccagccccacccccgacctgagctcccccaaagagaacccttccccactggaggcatggccccttcaggggagcagtgagaagctttgccagctgcaagtcccctggatcagctcacacctcagaacatcttgtccccagtgagctggcaggggcgccggcccagggcggggggcgctgctgtatctaaccggatcgattgtgcataaccgtctaggccggttcgtggaatgttcgtggggccccctgcccctccctcagcctccccccgcatccccccaagaaaggaaaattatttttcgtattgtaaactttaaacatgaaaaagctgtttttaatttagcagaaactggcttgaatcttcactttgtgaacgtttgtgtccttcagaggcagaatatgcctgcgcacactcgcacatgctcatgcacacacctgcacacgcatgccgcaacacgcacattcacatggccgtgctcgtgcacgcctgcacacgcatgcttgcccatacccacgcattgcagcgcgttcacacgctcacccgcacacagtgaaacacaagctcacacatatgcacacacacacatatctgtgcatgcacccctggaccagcgtagccc
